(19) United States
(12) Patent Application Publication
(10) Pub. No.: US 2019/0161542 A1
(43) Pub. Date: May 30, 2019

(54) TREATMENT OF CANCER USING A CHIMERIC ANTIGEN RECEPTOR IN COMBINATION WITH AN INHIBITOR OF A PRO-M2 MACROPHAGE MOLECULE

(71) Applicants: Novartis AG, Basel (CH); The Trustees of the University of Pennsylvania, Philadelphia, PA (US)

(72) Inventors: Saar Gill, Philadelphia, PA (US); Marco Ruella, Ardmore, PA (US); Michael Klichinsky, Philadelphia, PA (US)

(73) Assignees: Novartis AG, Basel (CH); The Trusteesof the University of Pennsylvania, Philadelphia, PA (US)

(21) Appl. No.: 16/322,285

(22) PCT Filed: Aug. 1, 2017
(86) PCT No.: PCT/US17/44909

§ 371 Date: Jan. 31, 2019

Related U.S. Application Data
(60) Provisional application No. 62/369,589, filed on Aug. 1, 2016.

(51) Int. Cl. C07K 16/24; C07K 16/28; A61P 35/00; C12N 15/86; A61K 35/17

(52) U.S. Cl. CPC C07K 16/24; C07K 16/28; A61K 35/17; C12N 15/86; A61P 35/00

(57) ABSTRACT

The invention provides compositions and methods for treating diseases associated with expression of an antigen, e.g., a solid tumor antigen or antigen expressed on a tumor associated with TAMs and/or MDSCs, by administering a recombinant T cell comprising a CAR binding to said antigen, as described herein, in combination with an inhibitor of a pro-M2 macrophage molecule, e.g., described herein. The invention also provides kits and compositions described herein.

### RELATED APPLICATIONS

[0001] This application claims priority to U.S. Ser. No. 62/369,589 filed Aug. 1, 2016, the contents of which are incorporated herein by reference in its entirety.

### SEQUENCE LISTING

[0002] The instant application contains a Sequence Listing which has been submitted electronically in ASCII format and is hereby incorporated by reference in their entirety. Said ASCII copy, created on Jul. 31, 2017, is named N2067-7113WO_SL.txt and is 1,549,304 bytes in size.

### FIELD OF THE INVENTION

[0003] The present invention relates generally to the use of T cells engineered to express a Chimeric Antigen Receptor (CAR), e.g., in combination with another agent such as, e.g., an inhibitor of a pro-M2 macrophage molecule, e.g., an inhibitor of IL-13, IL-13Rα1, IL-4, IL-4Rα, IL-10 or CSF-1, to treat a disease associated with expression of a cancer antigen, e.g., a solid tumor antigen or antigen on a cancer cell associated with tumor associated macrophages.

### BACKGROUND OF THE INVENTION

[0004] Many patients with malignancies are incurable with standard therapy. In addition, traditional treatment options often have serious side effects. Attempts have been made in cancer immunotherapy, however, several obstacles render this a very difficult goal to achieve clinical effectiveness. Although hundreds of so-called tumor antigens have been identified, these are generally derived from self and thus are poorly immunogenic. Furthermore, tumors use several mechanisms to render themselves hostile to the initiation and propagation of immune attack. Some of these mechanisms involve non-tumor cells that can be associated with the tumor cells, for example tumor-associated macrophages (TAMs), that can have a phenotype that is inhibitory to the immune response, e.g., an M2 phenotype.

[0005] Recent developments using chimeric antigen receptor (CAR) modified autologous T cell (CART) therapy, which relies on redirecting T cells to a suitable cell-surface molecule on cancer cells such as B cell malignancies, show promising results in harnessing the power of the immune system to treat B cell malignancies and other cancers (see, e.g., Sadelain et al., Cancer Discovery 3:388-398 (2013)). The clinical results of the murine derived CART19 (i.e., “CTL019”) have shown promise in establishing complete remissions in patients suffering with CLL as well as in childhood ALL (see, e.g., Kalos et al., Sci Transl Med 3:95ra73 (2011), Porter et al., NEJM 365:725-733 (2011), Grupp et al., NEJM 368:1509-1518 (2013)). Besides the ability for the chimeric antigen receptor on the genetically modified T cells to recognize and destroy the targeted cells, a successful therapeutic T cell therapy needs to have the ability to proliferate and persist over time, remain effective in an environment that inhibits their function, and to further monitor for malignant cell escapees. The variable quality of T cells, as well as in vivo anergy, suppression or exhaustion will have effects on CAR-transformed T cells' performance, over which skilled practitioners have limited control at this time. While certain CAR-transformed T cell products have proven effective, there is a need for CAR-transfromed T cell therapies with enhanced efficacy, e.g., enhanced efficacy against solid tumors and their associated immunoinhibitory tumor microenvironment (TME).

### SUMMARY OF THE INVENTION

[0006] The disclosure features, at least in part, compositions and methods of treating disorders such as cancer (e.g., solid tumors or tumors associated with tumor-associated macrophages) using immune effector cells (e.g., T cells or NK cells) that express a chimeric antigen receptor (CAR) molecule, e.g., a CAR that binds to a tumor antigen, e.g., an antigen expressed on the surface of a solid tumor or tumor associated with tumor-associated macrophages. The compositions include, and the methods include administering, immune effector cells (e.g., T cells or NK cells) expressing a tumor targeting CAR, in combination with an inhibitor of a pro-M2 macrophage molecule (e.g., an inhibitor of colony stimulating factor-1 (CSF-1), interleukin 10 (IL-10), interleukin 13 (IL-13), interleukin 4 (IL-4) or a receptor present on the surface of macrophage cells for IL-13 or IL-4, e.g., IL-13Rα1 or IL-4Rα). In some embodiments, the combination maintains or has better clinical effectiveness, e.g., against a solid tumor or tumor associated with tumor-associated macrophages, as compared to either therapy alone. Without being bound by theory, it is shown herein that use of an inhibitor of a pro-M2 macrophage molecule (e.g., as described herein) inhibits polarization of macrophages, e.g., tumor-associated macrophages (TAMs) to the M2 phenotype, or reverses the phenotype of M2 macrophages, e.g., tumor-associated macrophages (TAMs), thereby removing a source of inhibition of a function of CAR-expressing cells, e.g., CAR-expressing T cells, e.g., an anti-tumor or proliferative activity of the CAR-expressing cells. The invention further pertains to the use of engineered cells, e.g., immune effector cells (e.g., T cells or NK cells), that express a CAR molecule that binds to a tumor antigen, e.g., a solid tumor antigen or antigen on a tumor cell associated with tumor-associated macrophages, in combination with an inhibitor of a pro-M2 macrophage molecule (e.g., an inhibitor of a pro-M2 macrophage molecule described herein) to treat a disorder associated with expression of a tumor antigen, e.g., a solid tumor antigen or antigen on a tumor associated with tumor-associated macrophages (e.g., a cancer).

[0007] In a first aspect, the invention provides a method of treating a subject having a disease associated with expression of a tumor antigen (e.g., a subject having a cancer (e.g., a solid tumor or a tumor associated with tumor-associated macrophages)), including administering to the subject: (i) a CAR therapy including a cell, e.g., a population of immune effector cells, including, e.g., expressing, a chimeric antigen receptor (CAR) (e.g., as described herein). The CAR includes a tumor antigen binding domain (e.g., the tumor antigen binding domain of the CAR binds to CD19 or CD123), a transmembrane domain, and an intracellular signaling domain; and (ii) an inhibitor of a pro-M2 macrophage molecule (e.g., as described herein).

[0008] In another aspect, the invention provides a CAR therapy including a cell, e.g., a population of immune effector cells, including (e.g., expressing) a chimeric antigen receptor (CAR) for use in combination with an inhibitor of a pro-M2 macrophage molecule in treating a subject having a disease associated with expression of a tumor antigen (e.g., a subject having a cancer (e.g., a solid tumor or a tumor associated with tumor-associated macrophages)). The CAR includes a tumor antigen binding domain (e.g., the tumor antigen binding domain of the CAR binds to CD19 or CD123), a transmembrane domain, and an intracellular signaling domain.

[0009] In embodiments, the CAR therapy and the inhibitor of a pro-M2 macrophage molecule are administered sequentially.

[0010] In embodiments, including in any of the aforementioned aspects and embodiments, the inhibitor of a pro-M2 macrophage molecule is administered prior to the CAR therapy. In embodiments, including in any of the aforementioned aspects and embodiments, the inhibitor of a pro-M2 macrophage molecule and the CAR therapy are administered simultaneously or concurrently.

[0011] In embodiments, including in any of the aforementioned aspects and embodiments, the CAR therapy is administered as (a) single infusion or (b) multiple infusions (e.g., a single dose split into multiple infusions), and the inhibitor of a pro-M2 macrophage molecule is administered as (a) a single dose, or (b) multiple doses (e.g., a first and second, and optionally one or more subsequent doses).

[0012] In embodiments, including in any of the aforementioned aspects and embodiments, a dose of the CAR therapy is administered after (e.g., at least 1 day, 2 days, 3 days, 4 days, 5 days, 6 days, 7 days, 1 week, 2 weeks, 3 weeks, 4 weeks, 5 weeks, or more, after) administration of a first dose of the inhibitor of a pro-M2 macrophage molecule, e.g., and before administration of the second dose of the inhibitor.

[0013] In embodiments, including in any of the aforementioned aspects and embodiments, a dose of the CAR therapy is administered concurrently with (e.g., within 2 days (e.g., within 2 days, 1 day, 24 hours, 12 hours, 6 hours, 4 hours, 2 hours, or less) of), the administration of a first dose of the inhibitor of a pro-M2 macrophage molecule.

[0014] In embodiments, including in any of the aforementioned aspects and embodiments, one or more subsequent doses of the inhibitor of a pro-M2 macrophage molecule are administered after a second dose of the inhibitor of a pro-M2 macrophage molecule.

[0015] In embodiments, including in any of the aforementioned aspects and embodiments, the inhibitor of a pro-M2 macrophage moleculeis administered in more than one dose, and the doses are administered twice a day (BID), once a day, once a week, once every 14 days, or once every month.

[0016] In embodiments, including in any of the aforementioned aspects and embodiments, the administering of the inhibitor of a pro-M2 macrophage molecule includes multiple doses including a duration of at least 7 days, e.g., at least 7 days, 8 days, 9 days, 10 days, 1 week, 2 weeks, 3 weeks, 4 weeks, 5 weeks, 6 weeks, 1 month, 2 months, 3 months, 4 months, 5 months, 6 months, 7 months, 8 months, or more.

[0017] In embodiments, including in any of the aforementioned aspects and embodiments, the CAR therapy is administered at a dose comprising at least about 5×10⁶, 1×10⁷, 1.5×10⁷, 2×10⁷, 2.5×10⁷, 3×10⁷, 3.5×10⁷, 4×10⁷, 5×10⁷, 1×10⁸, 1.5×10⁸, 2×10⁸, 2.5×10⁸, 3×10⁸, 3.5×10⁸, 4×10⁸, 5×10⁸, 1×10⁹, 2×10⁹, or 5×10⁹ cells, e.g., CAR positive cells.

[0018] In another aspect, the invention provides a pharmaceutical composition including (i) a cell, e.g., a population of immune effector cells, including, e.g., expressing, a chimeric antigen receptor (CAR) (e.g., as described herein), wherein the CAR includes a tumor antigen binding domain, a transmembrane domain, and an intracellular signaling domain; and (ii) an inhibitor of a pro-M2 macrophage molecule (e.g., as described herein).

[0019] In another aspect, the invention provides a pharmaceutical composition including (i) a cell, e.g., a population of immune effector cells, including, e.g., expressing, a chimeric antigen receptor (CAR) (e.g., described herein), wherein the CAR includes a tumor antigen binding domain, a transmembrane domain, and an intracellular signaling domain; and (ii) an inhibitor of a pro-M2 macrophage molecule, (e.g., as described herein), for use in treating a disease or disorder described herein.

[0020] In another aspect, the invention provides a method for stimulating a T cell-mediated immune response to a solid tumor cell in a mammal, the method including administering to a mammal an effective amount of a composition of the previous aspects.

[0021] In another aspect, the invention provides a method of providing an anti-tumor, e.g., an anti-solid tumor, immunity in a mammal, including administering to the mammal an effective amount of the composition

[0022] In another aspect, the invention provides a method of treating a mammal having a disease associated with expression of a tumor antigen, e.g., a solid tumor antigen, said method including administering an effective amount of the composition of the previous aspects.

[0023] In embodiments, including in any of the method embodiments above, the cell, e.g., the population of immune effector cells, and the inhibitor of a pro-M2 macrophage molecule are provided for separate administration (e.g., in two separate compositions). In other embodiments, including in any of the method embodiments above, the cell, e.g., the population of immune effector cells, and the inhibitor of a pro-M2 macrophage molecule are provided for simultaneous administration (e.g., in one composition).

[0024] The following aspects of the inhibitor of the pro-M2 macrophage molecule may be utilized with any of the aforementioned aspects and embodiments.

[0025] In embodiments, the inhibitor of a pro-M2 macrophage molecule is an IL-13 inhibitor, an IL-4 inhibitor, an IL-13Rα1 inhibitor, an IL-4Rα inhibitor, an IL-10 inhibitor, a CSF-1 inhibitor, a TGF beta inhibitor, or combinations thereof, e.g., as described herein. In embodiments, the inhibitor of a pro-M2 macrophage molecule is an IL-13 inhibitor, an IL-4 inhibitor, an IL-13Rα1 inhibitor, an IL-4Rα inhibitor or combinations thereof, e.g., as described herein. In some embodiments, the inhibitor of a pro-M2 macrophage molecule is a small molecule, an antibody or antigen-binding fragment thereof, a protein (e.g., a fusion protein), a nucleic acid (e.g., an shRNA or siRNA), or a gene editing system. In some embodiment, the inhibitor of a pro-M2 macrophage molecule is an antibody or antigen-biding fragment thereof.

[0026] In some embodiments, the inhibitor of a pro-M2 macrophage molecule is an IL-13 inhibitor, an IL-4 inhibitor, an IL-13Rα1 inhibitor, an IL-4Rα inhibitor, an IL-10 inhibitor, a CSF-1 inhibitor, a TGF beta inhibitor, a JAK2 inhibitor, a cell surface molecule, an iron oxide, a small molecule inhibitor, a PI3K inhibitor, an HDAC inhibitor, an inhibitor of the glycolytic pathway, a mitochondria-targeted antioxidant, or a combination thereof, e.g., as described herein.

[0027] In one embodiment, the inhibitor of a pro-M2 macrophage molecule is an IL-13 inhibitor (e.g., fenretinide (4-HPR)).

[0028] In another embodiment, the inhibitor of a pro-M2 macrophage molecule is an IL-4 inhibitor (e.g., 4-HPR).

[0029] In another embodiment, the inhibitor of a pro-M2 macrophage molecule is an an IL-13Rα1 inhibitor.

[0030] In another embodiment, the inhibitor of a pro-M2 macrophage molecule is an IL-4Rα inhibitor.

[0031] In another embodiment, the inhibitor of a pro-M2 macrophage molecule is a CSF-1 inhibitor (e.g., nintedanib).

[0032] In another embodiment, the inhibitor of a pro-M2 macrophage molecule is a TGF beta inhibitor.

[0033] In another embodiment, the inhibitor of a pro-M2 macrophage molecule is a JAK2 inhibitor (e.g., ruxolitinib).

[0034] In another embodiment, the inhibitor of a pro-M2 macrophage molecule is a cell surface molecule (e.g., Dipeptidyl peptidase 4 (DPP4) or CD26).

[0035] In another embodiment, the inhibitor of a pro-M2 macrophage molecule is an iron oxide (e.g., ferumoxytol).

[0036] In another embodiment, the inhibitor of a pro-M2 macrophage molecule is a small molecule inhibitor (e.g., pterostilbene).

[0037] In another embodiment, the inhibitor of a pro-M2 macrophage molecule is a phosphoinositide 3-kinase (PI3K) inhibitor (e.g., tenalisib (RP6530)).

[0038] In another embodiment, the inhibitor of a pro-M2 macrophage molecule is an HDAC inhibitor (e.g., SAHA).

[0039] In another embodiment, the inhibitor of a pro-M2 macrophage molecule is an inhibitor of the glycolytic pathway (e.g., 2-deoxy-d-glucose (2-DG)).

[0040] In another embodiment, the inhibitor of a pro-M2 macrophage molecule is a mitochondria-targeted antioxidant (e.g., MitoQ).

[0041] In another aspect, the invention provides a method of treating a subject having a disease associated with expression of a tumor antigen (e.g., a subject having a cancer (e.g., a solid tumor or a tumor associated with tumor-associated macrophages)). The method includes administering to the subject (i) a CAR therapy including a cell, e.g., a population of immune effector cells, including (e.g., expressing) a chimeric antigen receptor (CAR), wherein the CAR includes a tumor antigen binding domain that binds to CD123, a transmembrane domain, and an intracellular signaling domain; and (ii) a tumor targeting therapy. In some embodiments, the CD123 CAR is administered in an amount and/or time sufficient to result in inhibition of an M2 macrophage activity. In embodiments, the inhibition of the M2 macrophage activity comprises inhibition of polarization of a macrophage to an M2 phenotype, and/or reversal of a phenotype of an M2 macrophage.

[0042] In another aspect, the invention provides a CAR therapy including a cell, e.g., a population of immune effector cells, comprising (e.g., expressing) a chimeric antigen receptor (CAR) for use in combination with a tumor targeting therapy in treating a subject having a disease associated with expression of a tumor antigen (e.g., a subject having cancer (e.g., a solid tumor or a tumor associated with tumor-associated macrophages)). The CAR includes a tumor antigen binding domain that binds CD123, a transmembrane domain, and an intracellular signaling domain. In some embodiments, the CD123 CAR is administered in an amount and/or time sufficient to result in inhibition of an M2 macrophage activity. In embodiments, the inhibition of the M2 macrophage activity comprises inhibition of polarization of a macrophage to an M2 phenotype, and/or reversal of a phenotype of an M2 macrophage.

[0043] In some embodiments of the methods and the CAR therapies for use disclosed herein, the tumor targeting therapy is a second CAR therapy that includes a cell, e.g., a population of immune effector cells, including (e.g., expressing) a CAR including a tumor antigen binding domain that binds to a tumor antigen other than CD123 (e.g., a CAR that binds to a solid tumor antigen or a hematologic tumor antigen other than CD123). In one embodiment, the tumor antigen binding domain binds to CD19, mesothelin, or EGFRviii.

[0044] In some embodiments of the methods and the CAR therapies for use disclosed herein, the tumor targeting therapy is or includes a CD19-inhibiting or depleting therapy, e.g., a therapy that includes a CD19 inhibitor. In some embodiments, the tumor targeting therapy includes a CD19 CAR-expressing cell, e.g., a CD19 CART cell, or an anti-CD19 antibody (e.g., an anti-CD19 mono- or bispecific antibody) or a fragment or conjugate thereof. In one embodiment, the CD19 inhibitor is a CD19 antibody, e.g., a CD19 bispecific antibody (e.g., a bispecific T cell engager that targets CD19, e.g., blinatumomab).

[0045] In other embodiments, including in any of the aforementioned aspects and embodiments, the CAR therapy and the tumor targeting therapy are administered sequentially.

[0046] In other embodiments, including in any of the aforementioned aspects and embodiments, the tumor targeting therapy is administered prior to the CAR therapy.

[0047] In other embodiments, including in any of the aforementioned aspects and embodiments, the CD123 CAR therapy is administered prior to the tumor targeting therapy. In some embodiments, the CD123 CAR therapy is administered at least 5 days, at least 7 days, at least 10 days, at least 15 days, at least 20 days, at least 1 month, at least 2 months, at least 3 months, at least 4 months, at least 5 months, at least 6 months, at least 7 months, at least 8 months, at least 9 months or at least 10 months, prior to administration of the tumor targeting therapy.

[0048] In other embodiments, including in any of the aforementioned aspects and embodiments, the tumor targeting therapy and the CAR therapy are administered simultaneously or concurrently.

[0049] In other embodiments, including in any of the aforementioned aspects and embodiments, the CAR therapy is administered as (a) single infusion or (b) multiple infusions (e.g., a single dose split into multiple infusions), and the tumor targeting therapy is administered as (a) a single dose, or (b) multiple doses (e.g., a first and second, and optionally one or more subsequent doses).

[0050] In other embodiments, including in any of the aforementioned aspects and embodiments, a dose of the CAR therapy is administered after (e.g., at least 1 day, 2 days, 3 days, 4 days, 5 days, 6 days, 7 days, 1 week, 2 weeks, 3 weeks, 4 weeks, 5 weeks, or more, after) administration of a first dose of the tumor targeting therapy, e.g., but before administration of the second dose of the tumor targeting therapy.

[0051] In other embodiments, a dose of the CAR therapy is administered concurrently with (e.g., within 2 days (e.g., within 2 days, 1 day, 24 hours, 12 hours, 6 hours, 4 hours, 2 hours, or less) of), the administration of a first dose of the tumor targeting therapy.

[0052] In other embodiments, one or more subsequent doses of the tumor targeting therapy are administered after a second dose of the tumor targeting therapy.

[0053] In other embodiments, the tumor targeting therapy is administered in more than one dose, and the doses are administered twice a day (BID), once a day, once a week, once every 14 days, or once every month.

[0054] In other embodiments, the administering of the tumor targeting therapy includes multiple doses comprising a duration of at least 7 days, e.g., at least 7 days, 8 days, 9 days, 10 days, 1 week, 2 weeks, 3 weeks, 4 weeks, 5 weeks, 6 weeks, 1 month, 2 months, 3 months, 4 months, 5 months, 6 months, 7 months, 8 months, or more.

[0055] In other embodiments, the CAR therapy or the tumor targeting therapy is administered at a dose comprising at least about 5×10⁶, 1×10⁷, 1.5×10⁷, 2×10⁷, 2.5×10⁷, 3×10⁷, 3.5×10⁷, 4×10⁷, 5×10⁷, 1×10⁸, 1.5×10⁸, 2×10⁸, 2.5×10⁸, 3×10⁸, 3.5×10⁸, 4×10⁸, 5×10⁸, 1×10⁹, 2×10⁹, or 5×10⁹ cells, e.g., CAR positive cells.

[0056] In some embodiments, the CAR therapy and the tumor targeting therapy are formulated in a pharmaceutical composition (e.g., comprising a pharmaceutical excipient).

[0057] The following aspects of the CAR and CAR-expressing cell, e.g., population of immune effector cells, may be utilized with any of the aforementioned aspects and embodiments.

[0058] In an aspect, the tumor antigen binding domain of the CAR binds CD123.

[0059] In embodiments, the tumor antigen binding domain of the CAR includes a heavy chain complementary determining region 1 (HC CDR1), a heavy chain complementary determining region 2 (HC CDR2), and a heavy chain complementary determining region 3 (HC CDR3) of any CD123 heavy chain binding domain amino acid sequence listed in Table 16, Table 18, Table 20, Table 22, Table 24, Table 25, Table 26, Table 27 or Table 28; and a light chain complementary determining region 1 (LC CDR1), a light chain complementary determining region 2 (LC CDR2), and a light chain complementary determining region 3 (LC CDR3) of any CD123 light chain binding domain amino acid sequence listed in Table 17, Table 19, Table 21, Table 23, Table 24, Table 25, Table 26, Table 27 or Table 28. In embodiments, the CD123 binding domain includes a CD123 binding domain (e.g., scFv) amino acid sequence listed in Table 26, Table 27 or Table 28. In embodiments, the CAR includes (e.g., consists of) a CAR amino acid sequence listed in Table 26 or Table 27.

[0060] In another aspect, the tumor antigen binding domain of the CAR binds mesothelin. In embodiments, the tumor antigen binding domain of the CAR includes a heavy chain complementary determining region 1 (HC CDR1), a heavy chain complementary determining region 2 (HC CDR2), and a heavy chain complementary determining region 3 (HC CDR3) of any mesothelin heavy chain binding domain amino acid sequence listed in Table 2, Table 3 or Table 11; and a light chain complementary determining region 1 (LC CDR1), a light chain complementary determining region 2 (LC CDR2), and a light chain complementary determining region 3 (LC CDR3) of any mesothelin light chain binding domain amino acid sequence listed in Table 2, Table 4 or Table 11. In embodiments, the mesothelin binding domain includes a mesothelin binding domain (e.g., scFv) amino acid sequence listed in Table 2 or Table 11. In embodiments, the CAR includes (e.g., consists of) a CAR amino acid sequence listed in Table 11.

[0061] In another aspect, the tumor antigen binding domain of the CAR binds EGFRvIII. In embodiments, the tumor antigen binding domain of the CAR includes a heavy chain complementary determining region 1 (HC CDR1), a heavy chain complementary determining region 2 (HC CDR2), and a heavy chain complementary determining region 3 (HC CDR3) of any EGFRvIII heavy chain binding domain amino acid sequence listed in Table 5; and a light chain complementary determining region 1 (LC CDR1), a light chain complementary determining region 2 (LC CDR2), and a light chain complementary determining region 3 (LC CDR3) of any EGFRvIII light chain binding domain amino acid sequence listed in Table 5. In embodiments, the EGFRvIII binding domain includes a EGFRvIII binding domain (e.g., scFv) amino acid sequence listed in Table 5. In embodiments, the CAR includes (e.g., consists of) a CAR amino acid sequence listed in Table 30.

[0062] In another aspect, the tumor antigen binding domain of the CAR binds CD19. In some embodiments, the tumor antigen binding domain of the CAR includes a heavy chain complementary determining region 1 (HC CDR1), a heavy chain complementary determining region 2 (HC CDR2), and a heavy chain complementary determining region 3 (HC CDR3) of any CD19 heavy chain binding domain amino acid sequence listed in Table 6, Table 7, or Table 9; and a light chain complementary determining region 1 (LC CDR1), a light chain complementary determining region 2 (LC CDR2), and a light chain complementary determining region 3 (LC CDR3) of any CD19 light chain binding domain amino acid sequence listed in Table 6, Table 8, or Table 9. In particular embodiments, the CD19 binding domain includes a CD19 binding domain (e.g., scFv) amino acid sequence listed in Table 6 or Table 9. In certain embodiments, the CD19 binding domain includes an amino acid sequence selected from the group consisting of SEQ ID NO: 83; SEQ ID NO: 84, SEQ ID NO: 85; SEQ ID NO: 86; SEQ ID NO: 87; SEQ ID NO: 88; SEQ ID NO: 89, SEQ ID NO: 90, SEQ ID NO: 91, SEQ ID NO: 92, SEQ ID NO: 93, SEQ ID NO: 94, SEQ ID NO: 95, and SEQ ID NO: 112.

[0063] In another aspect, the tumor antigen binding domain of the CAR binds a solid tumor antigen. In another aspect, the tumor antigen binding domain of the CAR binds an antigen expressed on a tumor associated with tumor-associated macrophages (TAMs) and/or myeloid derived suppressor cells (MDSCs). In embodiments, the solid tumor antigen or the antigen expressed on a tumor associated with tumor-associated macrophages (TAMs) and/or myeloid derived suppressor cells (MDSCs) is CD123, EGFRvIII, mesothelin, GD2, Tn antigen, sTn antigen, Tn-O-Glycopeptides, sTn-O-Glycopeptides, PSMA, CD97, TAG72, CD44v6, CEA, EPCAM, KIT, IL-13Ra2, leguman, GD3, CD171, IL-11Ra, PSCA, MAD-CT-1, MAD-CT-2, VEGFR2, LewisY, CD24, PDGFR-beta, SSEA-4, folate receptor alpha, ERBBs (e.g., ERBB2), Her2/neu, MUC1, EGFR, NCAM, Ephrin B2, CAIX, LMP2, sLe, HMWMAA, o-acetyl-GD2, folate receptor beta, TEM1/CD248, TEM7R, FAP, Legumain, HPV E6 or E7, ML-IAP, CLDN6, TSHR, GPRCSD, ALK, Polysialic acid, Fos-related antigen, neutrophil elastase, TRP-2, CYP1B1, sperm protein 17, beta human chorionic gonadotropin, AFP, thyroglobulin, PLAC1, globoH, RAGE1, MN-CA IX, human telomerase reverse transcriptase, intestinal carboxyl esterase, mut hsp 70-2, NA-17, NY-BR-1, UPK2, HAVCR1, ADRB3, PANX3, NY-ESO-1, GPR20, Ly6k, OR51E2, TARP, GFRα4, or a peptide of any of these antigens presented on MHC.

[0064] In another aspect, the tumor antigen binding domain of the CAR binds to a hematological cancer, e.g., as described herein. In some embodiments, the tumor antigen binding domain of the CAR binds to CD19. Any of the aforesaid CARs binding to CD19 can be used to treat a disease associated with expression of CD19, e.g., a CD19-expressing B cell malignancy as described herein.

[0065] In embodiments, including in any of the aforementioned aspects and embodiments, the intracellular signaling domain includes a primary signaling domain including a CD3-zeta stimulatory domain.

[0066] In embodiments, including in any of the aforementioned aspects and embodiments, the intracellular signaling domain includes a costimulatory domain which is an intracellular domain of a costimulatory protein selected from the group consisting of CD27, CD28, 4-1BB (CD137), OX40, GITR, CD30, CD40, ICOS, BAFFR, HVEM, ICAM-1, lymphocyte function-associated antigen-1 (LFA-1), CD2, CDS, CD7, CD287, LIGHT, NKG2C, NKG2D, SLAMF7, NKp80, NKp30, NKp44, NKp46, CD160, B7-H3, and a ligand that specifically binds with CD83. In embodiments, including in any of the aforementioned aspects and embodiments, the costimulatory domain includes an intracellular domain of 4-1BB. In embodiments, including in any of the aforementioned aspects and embodiments, the costimulatory domain includes an intracellular domain of CD28. In embodiments, including in any of the aforementioned aspects and embodiments, the intracellular signaling domain includes two costimulatory domains, e.g., a 4-1BB costimulatory domain and a CD28 costimulatory domain.

[0067] In embodiments, including in any of the aforementioned aspects and embodiments, the disease associated with expression of a tumor antigen is cancer. In embodiments, including in any of the aforementioned aspects and embodiments, the cancer is Hodgkin lymphoma. In embodiments where the cancer is Hodgkin lymphoma, the antigen binding domain of the CAR binds CD19 or CD123, e.g., binds CD123.

[0068] In embodiments, including in any of the aforementioned aspects and embodiments, the cancer is a solid cancer.

[0069] In embodiments, including in any of the aforementioned aspects and embodiments, the cell including a CAR includes a nucleic acid encoding the CAR. In embodiments, the nucleic acid encoding the CAR is a lentiviral vector. In embodiments, the nucleic acid encoding the CAR is introduced into the cells by lentiviral transduction.

[0070] In embodiments, including in any of the aforementioned aspects and embodiments, the nucleic acid encoding the CAR is an RNA, e.g., an in vitro transcribed RNA. In embodiments, the nucleic acid encoding the CAR is introduced into the cells by electroporation.

[0071] In embodiments, including in any of the aforementioned aspects and embodiments, the cell is a T cell or an NK cell. In embodiments, the T cell is an autologous or allogeneic T cell.

[0072] In embodiments, including in any of the aforementioned aspects and embodiments, the subject is a mammal, e.g., a human.

[0073] Headings, sub-headings or numbered or lettered elements, e.g., (a), (b), (i) etc, are presented merely for ease of reading. The use of headings or numbered or lettered elements in this document does not require the steps or elements be performed in alphabetical order or that the steps or elements are necessarily discrete from one another.

[0074] All publications, patent applications, patents, and other references mentioned herein are incorporated by reference in their entirety.

[0075] The disclosure includes all combinations of any one or more of the foregoing aspects and/or embodiments, as well as combinations with any one or more of the embodiments set forth in the detailed description and examples.

[0076] Other features, objects, and advantages of the invention will be apparent from the description and drawings, and from the claims.

### BRIEF DESCRIPTION OF THE DRAWINGS

[0077] The following detailed description of preferred embodiments of the invention will be better understood when read in conjunction with the appended drawings. For the purpose of illustrating the invention, there are shown in the drawings embodiments which are presently preferred. It should be understood, however, that the invention is not limited to the precise arrangements and instrumentalities of the embodiments shown in the drawings.

[0078] FIG. 1A shows Primary samples of Hodgkin lymphoma stained by immunohistochemistry for CD30 and CD123. Expression of CD123 was found of the HL Reed-sternberg cells but also in the tumor microenvironment, as opposed to CD30 that was only positive on HRS. FIG. 1B shows RNA expression of CD123 in 4 standard HL cell lines (MOLM-14 and A357 used as positive and negative controls). FIG. 1C shows CD123 was found to be also expressed on the surface of the HL cell lines (CD30 used as standard marker of HL).

[0079] FIG. 2A shows human normal donor macrophages differentiated from peripheral blood monocytes were co-cultured with HDLM-2 cells or IL-4 (M2 positive control) or a control acute lymphoblastic leukemia cell line (NALM-6). HL lymphoma cells (HDLM-2) can polarize macrophages to an M2 phenotype (CD163+CD206+) after a 24-hour culture. FIG. 2B shows M2-polarized macrophages (IL-4) are CD123+ by flow cytometry. FIG. 2C shows M2-polarized macrophages (IL-4) can inhibit anti-CD19 chimeric antigen receptor proliferation, as shown by CFSE dilution assay. FIG. 2D shows HL-polarized macrophages strongly inhibit CART19 proliferation, as shown by CFSE dilution assay and absolute T cell numbers at day 5 (FIG. 2E). FIG. 2F shows Luminex analysis of cytokines present in the supernatant of co-cultures of HL cells (HDLM-2) with macrophages reveales high levels of IL-13 as compared to controls. FIG. 2G shows blocking IL-13 with an anti-IL13 antibody reverted the HL-drived M2 polarization as shown by reduced PD-L1 expression.

[0080] FIG. 3A shows HL cells (HDLM-2) were co-cultured with CART123 for 4-6 hours. CAR+ but not CAR− T cells expressed high levels of the degranulation marker CD107A and produced intra-cellular cytokines like IFNγ, IL-2 and TNFα. FIG. 3B shows CART123 exert potent cytotoxicity against HL cells in a dose-dependent manner. FIG. 3C shows HL cells (HDLM-2) were co-cultured at long term with CART123 or control UTD. At day 20, CART123 but not UTD killed HL cells and proliferated. FIG. 3D shows CART123 or UTD were co-cultured with HL cell lines (or positive and negative controls) for 5 days. CART123 but not UTD controls showed significant proliferation as absolute number and CFSE dilution (FIG. 3E). FIG. 3F shows HL cells stimulated CART123 but not UTD cells to release multiple cytokines including GM-CSF, IFNγ, MIP1β and TNFα. In these Figures, E:T=effector:target cell ratio.

[0081] FIG. 4A shows the experimental schema for mouse experiments testing CD123 CART against HL. 2×106 Luciferase-positive HDLM-2 cells were injected i.v. in NSG mice and tumor engraftment was monitored by bioluminescence imaging. At day 42 mice were randomized to receive no treatment, 2×106 control untransduced T cells (UTD) or 2×106 CART123. FIG. 4B shows mice receiving CART123, but not controls, experienced complete response with long term remission of disease (>250 days). FIG. 4C shows CART123-treated mice have a significantly longer overall survival as compared to controls. FIG. 4D shows CAR123 T cells engraft, expand and disappear from the peripheral blood after clearing the tumor. T cells in the PB of CART123-treated mice were both CD8 and CD4 with high expression of the CAR.

[0082] FIG. 5A shows the experiment schema for establishment of long-term immunological memory in mice with HL: mice previously treated with CART123 and experiencing a long-term remission were rechallenged at day 250 with HL cells (HDLM-2). As a control a tumor-naïve group of mice were also injected with tumor. FIG. 5B shows HL cells only engrafted and grew in tumor-naïve mice while long-term surviving mice were able to control disease growth. FIG. 5C shows a re-expansion of CART123 cells observed in mice previously treated with CART123. FIG. 5D shows an improved overall survival was observed in mice with previous exposure to CART123.

[0083] FIG. 6A shows that in a 5-day CFSE proliferation CART123 are completely resistant to HL-polarized macrophages. FIG. 6B shows CART123 cells rapidly (day 1) recognize M2-macrophages, clustering around them and clearing them by day 5, as shown by phase contrast microscopy (20×) and flow cytometry, respectively. FIG. 6C shows CART123 were also able to secrete cytokines in the presence of HL-polarized M2 macrophages as opposed to control CART19 cells.

### DETAILED DESCRIPTION

### Definitions

[0084] Unless defined otherwise, all technical and scientific terms used herein have the same meaning as commonly understood by one of ordinary skill in the art to which the invention pertains.

[0085] The term “pro-M2 macrophage molecule” refers to a molecule that, alone or in combination with other molecules, contributes to the polarization of macrophages to an M2 phenotype. Non-limiting examples of pro-M2 macrophage molecules include the cytokines IL-13 (OMIM Acc. No. 147683; Entrez No. 3596; Swiss Prot. Acc. No. P35225), IL-4 (OMIM Acc. No. 147780; Entrez No. 3565; Swiss Prot. Acc. No. P05112), CSF-1 (Entrez No. 1435; Swiss Prot. Acc. No. P09603) and/or IL-10 (OMIM Acc. No. 124092; Entrez No. 3586; Swiss Prot. Acc. No. P22301).

[0086] The term “inhibitor of a pro-M2 macrophage molecule” refers to a molecule that inhibits the expression or function, e.g., receptor binding function, of a pro-M2 macrophage molecule. Inhibitors of pro-M2 macrophage molecules include a small molecule, an antibody molecule, a polypeptide, e.g., a fusion protein, an inhibitory nucleic acid, e.g., a siRNA or shRNA, or a gene editing system, e.g., a CRISPR/Cas9 system. An example of an inhibitor of pro-M2 macrophage molecule includes an inhibitor of IL-13. Another example of an inhibitor of pro-M2 macrophage molecule includes an inhibitor of IL-4. Another example of an inhibitor of pro-M2 macrophage molecule includes an inhibitor of IL-13Rα1 (Entrez No. 3597; Swiss Prot. Acc. No. P78552). Another example of an inhibitor of pro-M2 macrophage molecule includes an inhibitor of IL-10. Another example of an inhibitor of pro-M2 macrophage molecule includes an inhibitor of CSF-1. Additional detail regarding an inhibitor of pro-M2 macrophage molecule is provided below. In embodiments, the inhibitor of a pro-M2 macrophage inhibits a function, e.g., an inhibitory function, of a myeloid derived suppressor cell (MDSC).

[0087] The term “tumor associated macrophage” or “TAM” refers to cells of macrophage lineage, typically derived from monocytes or resident tissue macrophages, which are found in close proximity or within tumor masses, e.g., within the tumor stroma.

[0088] The term “myeloid derived supresssor cells” or “MDSCs” refer to myeloid derived cells which are found in close proximity or within tumor masses, e.g., within the tumor stroma.

[0089] The term “a” and “an” refers to one or to more than one (i.e., to at least one) of the grammatical object of the article. By way of example, “an element” means one element or more than one element.

[0090] The term “about” when referring to a measurable value such as an amount, a temporal duration, and the like, is meant to encompass variations of ±20% or in some instances ±10%, or in some instances ±5%, or in some instances ±1%, or in some instances ±0.1% from the specified value, as such variations are appropriate to perform the disclosed methods.

[0091] The term “Chimeric Antigen Receptor” or alternatively a “CAR” refers to a set of polypeptides, typically two in the simplest embodiments, which when in an immune effector cell, provides the cell with specificity for a target cell, typically a cancer cell, and with intracellular signal generation. In some embodiments, a CAR comprises at least an extracellular antigen binding domain, a transmembrane domain and a cytoplasmic signaling domain (also referred to herein as “an intracellular signaling domain”) comprising a functional signaling domain derived from a stimulatory molecule and/or costimulatory molecule as defined below. In some aspects, the set of polypeptides are contiguous with each other, e.g., are in the same polypeptide chain (e.g., comprise a chimeric fusion protein). In some embodiments, the set of polypeptides are not contiguous with each other, e.g., are in different polypeptide chains. In some embodiments, the set of polypeptides include a dimerization switch that, upon the presence of a dimerization molecule, can couple the polypeptides to one another, e.g., can couple an antigen binding domain to an intracellular signaling domain. In one aspect, the stimulatory molecule is the zeta chain associated with the T cell receptor complex. In one aspect, the cytoplasmic signaling domain further comprises one or more functional signaling domains derived from at least one costimulatory molecule as defined below. In one aspect, the costimulatory molecule is chosen from the costimulatory molecules described herein, e.g., 4-1BB (i.e., CD137), CD27 and/or CD28. In one aspect, the CAR comprises a chimeric fusion protein comprising an extracellular antigen binding domain, a transmembrane domain and an intracellular signaling domain comprising a functional signaling domain derived from a stimulatory molecule. In one aspect, the CAR comprises a chimeric fusion protein comprising an extracellular antigen binding domain, a transmembrane domain and an intracellular signaling domain comprising a functional signaling domain derived from a costimulatory molecule and a functional signaling domain derived from a stimulatory molecule. In one aspect, the CAR comprises a chimeric fusion protein comprising an extracellular antigen binding domain, a transmembrane domain and an intracellular signaling domain comprising two functional signaling domains derived from one or more costimulatory molecule(s) and a functional signaling domain derived from a stimulatory molecule. In one aspect, the CAR comprises a chimeric fusion protein comprising an extracellular antigen binding domain, a transmembrane domain and an intracellular signaling domain comprising at least two functional signaling domains derived from one or more costimulatory molecule(s) and a functional signaling domain derived from a stimulatory molecule. In one aspect the CAR comprises an optional leader sequence at the amino-terminus (N-ter) of the CAR fusion protein. In one aspect, the CAR further comprises a leader sequence at the N-terminus of the extracellular antigen binding domain, wherein the leader sequence is optionally cleaved from the antigen binding domain (e.g., a scFv) during cellular processing and localization of the CAR to the cellular membrane.

[0092] The term “signaling domain” refers to the functional portion of a protein which acts by transmitting information within the cell to regulate cellular activity via defined signaling pathways by generating second messengers or functioning as effectors by responding to such messengers.

[0093] As used herein, the terms “alpha subunit of the IL-3 receptor,” “IL3Rα,” “CD123,” “IL3Rα chain” and “IL3Rα subunit” refer interchangeably to an antigenic determinant known to be detectable on leukemia precursor cells. The human and murine amino acid and nucleic acid sequences can be found in a public database, such as GenBank, UniProt and Swiss-Prot. For example, the amino acid sequence of human IL3Rα can be found at Accession No. NP 002174 and the nucleotide sequence encoding of the human IL3Rα can be found at Accession No. NM 005191. In one aspect the antigen-binding portion of the CAR recognizes and binds an epitope within the extracellular domain of the CD123 protein. In one aspect, the CD123 protein is expressed on a cancer cell. As used herein, “CD123” includes proteins comprising mutations, e.g., point mutations, fragments, insertions, deletions and splice variants of full length wild-type CD123.

[0094] As used herein, the term “CD19” refers to the Cluster of Differentiation 19 protein, which is an antigenic de terminant detectable on leukemia precursor cells. The human and murine amino acid and nucleic acid sequences can be found in a public database, such as GenBank, UniProt and Swiss-Prot. For example, the amino acid sequence of human CD19 can be found as UniProt/Swiss-Prot Accession No. P15391 and the nucleotide sequence encoding of the human CD19 can be found at Accession No. NM_001178098. As used herein, “CD19” includes proteins comprising mutations, e.g., point mutations, fragments, insertions, deletions and splice variants of full length wild-type CD19. CD19 is expressed on most B lineage cancers, including, e.g., acute lymphoblastic leukaemia, chronic lymphocyte leukaemia and non-Hodgkin lymphoma. Other cells with express CD19 are provided below in the definition of “disease associated with expression of CD19.” It is also an early marker of B cell progenitors. See, e.g., Nicholson et al. Mol. Immun. 34 (16-17): 1157-1165 (1997). In one aspect the antigen-binding portion of the CART recognizes and binds an antigen within the extracellular domain of the CD19 protein. In one aspect, the CD19 protein is expressed on a cancer cell.

[0095] As used herein, the term “CD20” refers to an antigenic determinant known to be detectable on B cells. Human CD20 is also called membrane-spanning 4-domains, subfamily A, member 1 (MS4A1). The human and murine amino acid and nucleic acid sequences can be found in a public database, such as GenBank, UniProt and Swiss-Prot. For example, the amino acid sequence of human CD20 can be found at Accession Nos. NP_690605.1 and NP_068769.2, and the nucleotide sequence encoding transcript variants 1 and 3 of the human CD20 can be found at Accession No. NM_152866.2 and NM_021950.3, respectively. In one aspect the antigen-binding portion of the CAR recognizes and binds an antigen within the extracellular domain of the CD20 protein. In one aspect, the CD20 protein is expressed on a cancer cell.

[0096] As used herein, the term “CD22,” refers to an antigenic determinant known to be detectable on leukemia precursor cells. The human and murine amino acid and nucleic acid sequences can be found in a public database, such as GenBank, UniProt and Swiss-Prot. For example, the amino acid sequences of isoforms 1-5 human CD22 can be found at Accession Nos. NP 001762.2, NP 001172028.1, NP 001172029.1, NP 001172030.1, and NP 001265346.1, respectively, and the nucleotide sequence encoding variants 1-5 of the human CD22 can be found at Accession No. NM 001771.3, NM 001185099.1, NM 001185100.1, NM 001185101.1, and NM 001278417.1, respectively. In one aspect the antigen-binding portion of the CAR recognizes and binds an antigen within the extracellular domain of the CD22 protein. In one aspect, the CD22 protein is expressed on a cancer cell.

[0097] As used herein, the term “ROR1” refers to an antigenic determinant known to be detectable on leukemia precursor cells. The human and murine amino acid and nucleic acid sequences can be found in a public database, such as GenBank, UniProt and Swiss-Prot. For example, the amino acid sequences of isoforms 1 and 2 precursors of human ROR1 can be found at Accession Nos. NP_005003.2 and NP_001077061.1, respectively, and the mRNA sequences encoding them can be found at Accession Nos. NM_005012.3 and NM_001083592.1, respectively. In one aspect the antigen-binding portion of the CAR recognizes and binds an antigen within the extracellular domain of the ROR1 protein. In one aspect, the ROR1 protein is expressed on a cancer cell.

[0098] As used herein, the term “CD33” refers to the Cluster of Differentiation 33 protein, which is an antigenic determinant detectable on leukemia cells as well on normal precursor cells of the myeloid lineage. The human and murine amino acid and nucleic acid sequences can be found in a public database, such as GenBank, UniProt and Swiss-Prot. For example, the amino acid sequence of human CD33 can be found as UniProt/Swiss-Prot Accession No. P20138 and the nucleotide sequence encoding of the human CD33 can be found at Accession No. NM_001772.3. In one aspect the antigen-binding portion of the CAR recognizes and binds an epitope within the extracellular domain of the CD33 protein or fragments thereof. In one aspect, the CD33 protein is expressed on a cancer cell. As used herein, “CD33” includes proteins comprising mutations, e.g., point mutations, fragments, insertions, deletions and splice variants of full length wild-type CD33.

[0099] As used herein, the term “BCMA” refers to B-cell maturation antigen. BCMA (also known as TNFRSF17, BCM or CD269) is a member of the tumor necrosis receptor (TNFR) family and is predominantly expressed on terminally differentiated B cells, e.g., memory B cells, and plasma cells. Its ligand is called B-cell activator of the TNF family (BAFF) and a proliferation inducing ligand (APRIL). BCMA is involved in mediating the survival of plasma cells for mataining long-term humoral immunity. The gene for BCMA is encoded on chromosome 16 producing a primary mRNA transcript of 994 nucleotides in length (NCBI accession NM_001192.2) that encodes a protein of 184 amino acids (NP_001183.2). A second antisense transcript derived from the BCMA locus has been described, which may play a role in regulating BCMA expression. (Laabi Y. et al., Nucleic Acids Res., 1994, 22:1147-1154). Additional transcript variants have been described with unknown significance (Smirnova A S et al. Mol Immunol., 2008, 45(4):1179-1183. A second isoform, also known as TV4, has been identified (Uniprot identifier Q02223-2). As used herein, “BCMA” includes proteins comprising mutations, e.g., point mutations, fragments, insertions, deletions and splice variants of full length wild-type BCMA.

[0100] As used herein, the term “CLL-1” refers to C-type lectin-like molecule-1, which is an antigenic determinant detectable on leukemia precursor cells and on normal immune cells. C-type lectin-like-1 (CLL-1) is also known as MICL, CLEC12A, CLEC-1, Dendritic Cell-Associated Lectin 1, and DCAL-2. The human and murine amino acid and nucleic acid sequences can be found in a public database, such as GenBank, UniProt and Swiss-Prot. For example, the amino acid sequence of human CLL-1 can be found as UniProt/Swiss-Prot Accession No. Q5QGZ9 and the nucleotide sequence encoding of the human CLL-1 can be found at Accession Nos. NM_001207010.1, NM_138337.5, NM_201623.3, and NM_201625.1. In one embodiment, the antigen-binding portion of the CAR recognizes and binds an epitope within the extracellular domain of the CLL-1 protein or a fragment thereof. In one embodiment, the CLL-1 protein is expressed on a cancer cell.

[0101] The term “EGFR” refers to any mammalian mature full-length epidermal growth factor receptor, including human and non-human forms. The 1186 amino acid human EGFR is described in Ullrich et al., Nature 309:418-425 (1984)) and GenBank Accession No. AF125253 and SwissProt Acc No P00533-2.

[0102] The term “EGFRvIII” refers to Epidermal growth factor receptor variant III. EGFRvIII is the most common variant of EGFR observed in human tumors but is rarely observed in normal tissue. This protein results from the in-frame deletion of exons 2-7 and the generation of a novel glycine residue at the junction of exons 1 and 8 within the extra-cellular domain of the EGFR, thereby creating a tumor specific epitope. EGFRvIII is expressed in 24% to 67% of GBM, but not in normal tissues. EGFRvIII is also known as type III mutant, delta-EGFR, EGFRde2-7, and AEGFR and is described in U.S. Pat. Nos. 6,455,498, 6,127,126, 5,981,725, 5,814,317, 5,710,010, 5,401,828, and 5,212,290. Expression of EGFRvIII may result from a chromosomal deletion, and may also result from aberrant alternative splicing. See Sugawa et al., 1990, Proc. Natl. Acad. Sci. 87:8602-8606.

[0103] As used herein, the term “mesothelin” refers to the 40-kDa protein, mesothelin, which is anchored at the cell membrane by a glycosylphosphatidyl inositol (GPI) linkage and an amino-terminal 31-kDa shed fragment, called megkaryocyte potentiating factor (MPF). Both fragments contain N-glycosylation sites. The term also refers to a soluble splice variant of the 40-kDa carboxyl-terminal fragment also called “soluble mesothelin/MPF-related”. Preferably, the term refers to a human mesothelin of GenBank accession number AAH03512.1, and naturally cleaved portions thereof, e.g., as expressed on a cell membrane, e.g., a cancer cell membrane.

[0104] The term “antibody,” as used herein, refers to a protein, or polypeptide sequence derived from an immunoglobulin molecule which specifically binds with an antigen. Antibodies can be polyclonal or monoclonal, multiple or single chain, or intact immunoglobulins, and may be derived from natural sources or from recombinant sources. Antibodies can be tetramers of immunoglobulin molecules.

[0105] The term “antibody fragment” refers to at least one portion of an antibody, that retains the ability to specifically interact with (e.g., by binding, steric hinderance, stabilizing/destabilizing, spatial distribution) an epitope of an antigen. Examples of antibody fragments include, but are not limited to, Fab, Fab′, F(ab′)₂, Fv fragments, scFv antibody fragments, disulfide-linked Fvs (sdFv), a Fd fragment consisting of the VH and CH1 domains, linear antibodies, single domain antibodies such as sdAb (either VL or VH), camelid VHH domains, multi-specific antibodies formed from antibody fragments such as a bivalent fragment comprising two Fab fragments linked by a disulfide brudge at the hinge region, and an isolated CDR or other epitope binding fragments of an antibody. An antigen binding fragment can also be incorporated into single domain antibodies, maxibodies, minibodies, nanobodies, intrabodies, diabodies, triabodies, tetrabodies, v-NAR and bis-scFv (see, e.g., Hollinger and Hudson, Nature Biotechnology 23:1126-1136, 2005). Antigen binding fragments can also be grafted into scaffolds based on polypeptides such as a fibronectin type III (Fn3)(see U.S. Pat. No. 6,703,199, which describes fibronectin polypeptide minibodies).

[0106] The term “scFv” refers to a fusion protein comprising at least one antibody fragment comprising a variable region of a light chain and at least one antibody fragment comprising a variable region of a heavy chain, wherein the light and heavy chain variable regions are contiguously linked, e.g., via a synthetic linker, e.g., a short flexible polypeptide linker, and capable of being expressed as a single chain polypeptide, and wherein the scFv retains the specificity of the intact antibody from which it is derived. Unless specified, as used herein an scFv may have the VL and VH variable regions in either order, e.g., with respect to the N-terminal and C-terminal ends of the polypeptide, the scFv may comprise VL-linker-VH or may comprise VH-linker-VL.

[0107] The portion of the CAR of the invention comprising an antibody or antibody fragment thereof may exist in a variety of forms where the antigen binding domain is expressed as part of a contiguous polypeptide chain including, for example, a single domain antibody fragment (sdAb), a single chain antibody (scFv), a humanized antibody or bispecific antibody (Harlow et al., 1999, In: Using Antibodies: A Laboratory Manual, Cold Spring Harbor Laboratory Press, NY; Harlow et al., 1989, In: Antibodies: A Laboratory Manual, Cold Spring Harbor, N.Y.; Houston et al., 1988, Proc. Natl. Acad. Sci. USA 85:5879-5883; Bird et al., 1988, Science 242:423-426). In one aspect, the antigen binding domain of a CAR composition of the invention comprises an antibody fragment. In a further aspect, the CAR comprises an antibody fragment that comprises a scFv. The precise amino acid sequence boundaries of a given CDR can be determined using any of a number of well-known schemes, including those described by Kabat et al. (1991), “Sequences of Proteins of Immunological Interest,” 5th Ed. Public Health Service, National Institutes of Health, Bethesda, Md. (“Kabat” numbering scheme), Al-Lazikani et al., (1997) JMB 273,927-948 (“Chothia” numbering scheme), or a combination thereof.

[0108] As used herein, the term “binding domain” or “antibody molecule” refers to a protein, e.g., an immunoglobulin chain or fragment thereof, comprising at least one immunoglobulin variable domain sequence. The term “binding domain” or “antibody molecule” encompasses antibodies and antibody fragments. In an embodiment, an antibody molecule is a multispecific antibody molecule, e.g., it comprises a plurality of immunoglobulin variable domain sequences, wherein a first immunoglobulin variable domain sequence of the plurality has binding specificity for a first epitope and a second immunoglobulin variable domain sequence of the plurality has binding specificity for a second epitope. In an embodiment, a multispecific antibody molecule is a bispecific antibody molecule. A bispecific antibody has specificity for no more than two antigens. A bispecific antibody molecule is characterized by a first immunoglobulin variable domain sequence which has binding specificity for a first epitope and a second immunoglobulin variable domain sequence that has binding specificity for a second epitope.

[0109] The portion of the CAR of the invention comprising an antibody or antibody fragment thereof may exist in a variety of forms where the antigen binding domain is expressed as part of a contiguous polypeptide chain including, for example, a single domain antibody fragment (sdAb), a single chain antibody (scFv), a humanized antibody, or bispecific antibody (Harlow et al., 1999, In: Using Antibodies: A Laboratory Manual, Cold Spring Harbor Laboratory Press, NY; Harlow et al., 1989, In: Antibodies: A Laboratory Manual, Cold Spring Harbor, N.Y.; Houston et al., 1988, Proc. Natl. Acad. Sci. USA 85:5879-5883; Bird et al., 1988, Science 242:423-426). In one aspect, the antigen binding domain of a CAR composition of the invention comprises an antibody fragment. In a further aspect, the CAR comprises an antibody fragment that comprises a scFv.

[0110] The term “antibody heavy chain,” refers to the larger of the two types of polypeptide chains present in antibody molecules in their naturally occurring conformations, and which normally determines the class to which the antibody belongs.

[0111] The term “antibody light chain,” refers to the smaller of the two types of polypeptide chains present in antibody molecules in their naturally occurring conformations. Kappa (κ) and lambda (λ) light chains refer to the two major antibody light chain isotypes.

[0112] The term “recombinant antibody” refers to an antibody which is generated using recombinant DNA technology, such as, for example, an antibody expressed by a bacteriophage or yeast expression system. The term should also be construed to mean an antibody which has been generated by the synthesis of a DNA molecule encoding the antibody and which DNA molecule expresses an antibody protein, or an amino acid sequence specifying the antibody, wherein the DNA or amino acid sequence has been obtained using recombinant DNA or amino acid sequence technology which is available and well known in the art.

[0113] The term “antigen” or “Ag” refers to a molecule that provokes an immune response. This immune response may involve either antibody production, or the activation of specific immunologically-competent cells, or both. The skilled artisan will understand that any macromolecule, including virtually all proteins or peptides, can serve as an antigen. Furthermore, antigens can be derived from recombinant or genomic DNA. A skilled artisan will understand that any DNA, which comprises a nucleotide sequences or a partial nucleotide sequence encoding a protein that elicits an immune response therefore encodes an “antigen” as that term is used herein. Furthermore, one skilled in the art will understand that an antigen need not be encoded solely by a full length nucleotide sequence of a gene. It is readily apparent that the present invention includes, but is not limited to, the use of partial nucleotide sequences of more than one gene and that these nucleotide sequences are arranged in various combinations to encode polypeptides that elicit the desired immune response. Moreover, a skilled artisan will understand that an antigen need not be encoded by a “gene” at all. It is readily apparent that an antigen can be generated synthesized or can be derived from a biological sample, or might be macromolecule besides a polypeptide. Such a biological sample can include, but is not limited to a tissue sample, a tumor sample, a cell or a fluid with other biological components.

The term “anti-cancer effect” refers to a biological effect which can be manifested by various means, including but not limited to, e.g., a decrease in tumor volume, a decrease in the number of cancer cells, a decrease in the number of metastases, an increase in life expectancy, decrease in cancer cell proliferation, decrease in cancer cell survival, or amelioration of various physiological symptoms associated with the cancerous condition. An “anti-cancer effect” can also be manifested by the ability of the peptides, polynucleotides, cells and antibodies in prevention of the occurrence of cancer in the first place. The term “anti-tumor effect” refers to a biological effect which can be manifested by various means, including but not limited to, e.g., a decrease in tumor volume, a decrease in the number of tumor cells, a decrease in tumor cell proliferation, or a decrease in tumor cell survival.

[0114] The term “autologous” refers to any material derived from the same individual to whom it is later to be re-introduced into the individual.

[0115] The term “allogeneic” refers to any material derived from a different animal of the same species as the individual to whom the material is introduced. Two or more individuals are said to be allogeneic to one another when the genes at one or more loci are not identical. In some aspects, allogeneic material from individuals of the same species may be sufficiently unlike genetically to interact antigenically

[0116] The term “xenogeneic” refers to a graft derived from an animal of a different species.

[0117] The term “cancer” refers to a disease characterized by the uncontrolled growth of aberrant cells. Cancer cells can spread locally or through the bloodstream and lymphatic system to other parts of the body. Examples of various cancers are described herein and include but are not limited to, breast cancer, prostate cancer, ovarian cancer, cervical cancer, skin cancer, pancreatic cancer, colorectal cancer, renal cancer, liver cancer, brain cancer, lymphoma, leukemia, lung cancer and the like. The terms “tumor” and “cancer” are used interchangeably herein, e.g., both terms encompass solid and liquid, e.g., diffuse or circulating, tumors. As used herein, the term “cancer” or “tumor” includes premalignant, as well as malignant cancers and tumors.

[0118] The phrase “disease associated with expression of CD19” includes, but is not limited to, a disease associated with expression of CD19 or condition associated with cells which express, or at any time expressed, CD19 including, e.g., proliferative diseases such as a cancer or malignancy or a precancerous condition such as a myelodysplasia, a myelodysplastic syndrome or a preleukemia; or a noncancer related indication associated with cells which express CD19. For the avoidance of doubt, a disease associated with expression of CD19 may include a condition associated with cells which do not presently express CD19, e.g., because CD19 expression has been downregulated, e.g., due to treatment with a molecule targeting CD19, e.g., a CD19 CAR, but which at one time expressed CD19. In one aspect, a cancer associated with expression of CD19 is a hematological cancer. In one aspect, the hematological cancer is a leukemia or a lymphoma. In one aspect, a cancer associated with expression of CD19 includes cancers and malignancies including, but not limited to, e.g., one or more acute leukemias including but not limited to, e.g., B-cell acute Lymphoid Leukemia (BALL), T-cell acute Lymphoid Leukemia (TALL), acute lymphoid leukemia (ALL); one or more chronic leukemias including but not limited to, e.g., chronic myelogenous leukemia (CML), Chronic Lymphoid Leukemia (CLL). Additional cancers or hematologic conditions associated with expression of CD19 comprise, but are not limited to, e.g., B cell prolymphocytic leukemia, blastic plasmacytoid dendritic cell neoplasm, Burkitt's lymphoma, diffuse large B cell lymphoma, Follicular lymphoma, Hairy cell leukemia, small cell- or a large cell-follicular lymphoma, malignant lymphoproliferative conditions, MALT lymphoma, mantle cell lymphoma (MCL), Marginal zone lymphoma, multiple myeloma, myelodysplasia and myelodysplastic syndrome, non-Hodgkin lymphoma, Hodgkin lymphoma, plasmablastic lymphoma, plasmacytoid dendritic cell neoplasm, Waldenstrom macroglobulinemia, and “preleukemia” which are a diverse collection of hematological conditions united by ineffective production (or dysplasia) of myeloid blood cells, and the like. Further diseases associated with expression of CD19 expression include, but not limited to, e.g., atypical and/or non-classical cancers, malignancies, precancerous conditions or proliferative diseases associated with expression of CD19. Non-cancer related indications associated with expression of CD19 include, but are not limited to, e.g., autoimmune disease, (e.g., lupus), inflammatory disorders (allergy and asthma) and transplantation. In some embodiments, the tumor antigen-expressing cells express, or at any time expressed, mRNA encoding the tumor antigen. In an embodiment, the tumor antigen-expressing cells produce the tumor antigen protein (e.g., wild-type or mutant), and the tumor antigen protein may be present at normal levels or reduced levels. In an embodiment, the tumor antigen-expressing cells produced detectable levels of a tumor antigen protein at one point, and subsequently produced substantially no detectable tumor antigen protein.

[0119] The phrase “disease associated with expression of a B-cell antigen” includes, but is not limited to, a disease associated with expression of one or more of CD19, CD20, CD22 or ROR1, or a condition associated with cells which express, or at any time expressed, one or more of CD19, CD20, CD22 or ROR1, including, e.g., proliferative diseases such as a cancer or malignancy or a precancerous condition such as a myelodysplasia, a myelodysplastic syndrome or a preleukemia; or a noncancer related indication associated with cells which express one or more of CD19, CD20, CD22 or ROR1. For the avoidance of doubt, a disease associated with expression of the B-cell antigen may include a condition associated with cells which do not presently express the B-cell antigen, e.g., because the antigen expression has been downregulated, e.g., due to treatment with a molecule targeting the B-cell antigen, e.g., a B-cell targeting CAR, but which at one time expressed the antigen. The phrase “disease associated with expression of a B-cell antigen” includes a disease associated with expression of CD19, as described herein.

[0120] The phrase “disease associated with expression of CD123” as used herein includes but is not limited to, a disease associated with expression of CD123 or condition associated with a cell which expresses CD123 (e.g., wild-type or mutant CD123) including, e.g., a proliferative disease such as a cancer or malignancy; a precancerous condition such as a myelodysplasia, a myelodysplastic syndrome or a preleukemia; or a non-cancer related indication associated with a cell which expresses CD123 (e.g., wild-type or mutant CD123). In one aspect, a cancer associated with expression of CD123 (e.g., wild-type or mutant CD123) is a hematological cancer. In one aspect, the disease includes AML, ALL, hairy cell leukemia, Prolymphocytic leukemia, Chronic myeloid leukemia (CML), Hodgkin lymphoma, Blastic plasmacytoid dendritic cell neoplasm, lymphoblastic B-cell leukemia (B-cell acute lymphoid leukemia, BALL), acute lymphoblastic T-cell leukemia (T-cell acute lymphoid leukemia (TALL); myelodysplastic syndrome; a myeloproliferative neoplasm; a histiocytic disorder (e.g., a mast cell disorder or a blastic plasmacytoid dendritic cell neoplasm); a mast cell disorder, e.g., systemic mastocytosis or mast cell leukemia, and the like. Further disease associated with expression of CD123 expression include, but are not limited to, e.g., atypical and/or non-classical cancers, malignancies, precancerous conditions or proliferative diseases associated with expression of CD123. Non-cancer related indications associated with expression of CD123 may also be included.

[0121] The phrase “disease associated with expression of CD33” as used herein includes but is not limited to, a disease associated with a cell which expresses CD33 (e.g., wild-type or mutant CD33) or condition associated with a cell which expresses CD33 (e.g., wild-type or mutant CD33) including, e.g., a proliferative disease such as a cancer or malignancy or a precancerous condition such as a myelodysplasia, a myelodysplastic syndrome or a preleukemia; or a noncancer related indication associated with a cell which expresses CD33 (e.g., wild-type or mutant CD33). For the avoidance of doubt, a disease associated with expression of CD33 may include a condition associated with a cell which do not presently express CD33, e.g., because CD33 expression has been downregulated, e.g., due to treatment with a molecule targeting CD33, e.g., a CD33 inhibitor described herein, but which at one time expressed CD33. In one aspect, a cancer associated with expression of CD33 (e.g., wild-type or mutant CD33) is a hematological cancer. In one aspect, a hematological cancer includes but is not limited to acute myeloid leukemia (AML), myelodysplasia and myelodysplastic syndrome, myelofibrosis and myeloproliferative neoplasms, acute lymphoid leukemia (ALL), hairy cell leukemia, Prolymphocytic leukemia, chronic myeloid leukemia (CML), Blastic plasmacytoid dendritic cell neoplasm, and the like. Further disease associated with expression of CD33 (e.g., wild-type or mutant CD33) expression include, but are not limited to, e.g., atypical and/or non-classical cancers, malignancies, precancerous conditions or proliferative diseases associated with expression of CD33 (e.g., wild-type or mutant CD33). Non-cancer related indications associated with expression of CD33 (e.g., wild-type or mutant CD33) may also be included. In embodiments, a non-cancer related indication associated with expression of CD33 includes but is not limited to, e.g., autoimmune disease, (e.g., lupus), inflammatory disorders (allergy and asthma) and transplantation. In some embodiments, the tumor antigen-expressing cell expresses, or at any time expressed, mRNA encoding the tumor antigen. In an embodiment, the tumor antigen-expressing cell produces the tumor antigen protein (e.g., wild-type or mutant), and the tumor antigen protein may be present at normal levels or reduced levels. In an embodiment, the tumor antigen-expressing cell produced detectable levels of a tumor antigen protein at one point, and subsequently produced substantially no detectable tumor antigen protein.

[0122] The phrase “disease associated with expression of BCMA” includes, but is not limited to, a disease associated with a cell which expresses BCMA (e.g., wild-type or mutant BCMA) or condition associated with a cell which expresses BCMA (e.g., wild-type or mutant BCMA) including, e.g., proliferative diseases such as a cancer or malignancy or a precancerous condition such as a myelodysplasia, a myelodysplastic syndrome or a preleukemia; or a noncancer related indication associated with a cell which expresses BCMA (e.g., wild-type or mutant BCMA). For the avoidance of doubt, a disease associated with expression of BCMA may include a condition associated with a cell which does not presently express BCMA, e.g., because BCMA expression has been downregulated, e.g., due to treatment with a molecule targeting BCMA, e.g., a BCMA inhibitor described herein, but which at one time expressed BCMA. In one aspect, a cancer associated with expression of BCMA (e.g., wild-type or mutant BCMA) is a hematological cancer. In one aspect, the hematogical cancer is a leukemia or a lymphoma. In one aspect, a cancer associated with expression of BCMA (e.g., wild-type or mutant BCMA) is a malignancy of differentiated plasma B cells. In one aspect, a cancer associated with expression of BCMA (e.g., wild-type or mutant BCMA) includes cancers and malignancies including, but not limited to, e.g., one or more acute leukemias including but not limited to, e.g., B-cell acute Lymphoid Leukemia (“BALL”), T-cell acute Lymphoid Leukemia (“TALL”), acute lymphoid leukemia (ALL); one or more chronic leukemias including but not limited to, e.g., chronic myelogenous leukemia (CML), Chronic Lymphoid Leukemia (CLL). Additional cancers or hematologic conditions associated with expression of BMCA (e.g., wild-type or mutant BCMA) comprise, but are not limited to, e.g., B cell prolymphocytic leukemia, blastic plasmacytoid dendritic cell neoplasm, Burkitt's lymphoma, diffuse large B cell lymphoma, Follicular lymphoma, Hairy cell leukemia, small cell- or a large cell-follicular lymphoma, malignant lymphoproliferative conditions, MALT lymphoma, mantle cell lymphoma, Marginal zone lymphoma, multiple myeloma, myelodysplasia and myelodysplastic syndrome, non-Hodgkin's lymphoma, plasmablastic lymphoma, plasmacytoid dendritic cell neoplasm, Waldenstrom macroglobulinemia, and “preleukemia” which are a diverse collection of hematological conditions united by ineffective production (or dysplasia) of myeloid blood cells, and the like. In some embodiments, the cancer is multiple myeloma, Hodgkin's lymphoma, non-Hodgkin's lymphoma, or glioblastoma. In embodiments, a disease associated with expression of BCMA includes a plasma cell proliferative disorder, e.g., asymptomatic myeloma (smoldering multiple myeloma or indolent myeloma), monoclonal gammapathy of undetermined significance (MGUS), Waldenstrom's macroglobulinemia, plasmacytomas (e.g., plasma cell dyscrasia, solitary myeloma, solitary plasmacytoma, extramedullary plasmacytoma, and multiple plasmacytoma), systemic amyloid light chain amyloidosis, and POEMS syndrome (also known as Crow-Fukase syndrome, Takatsuki disease, and PEP syndrome). Further diseases associated with expression of BCMA (e.g., wild-type or mutant BCMA) expression include, but not limited to, e.g., atypical and/or non-classical cancers, malignancies, precancerous conditions or proliferative diseases associated with expression of BCMA (e.g., wild-type or mutant BCMA), e.g., a cancer described herein, e.g., a prostate cancer (e.g., castrate-resistant or therapy-resistant prostate cancer, or metastatic prostate cancer), pancreatic cancer, or lung cancer.

[0123] Non-cancer related conditions that are associated with BCMA (e.g., wild-type or mutant BCMA) include viral infections; e.g., HIV, fungal invections, e.g., C. neoformans; autoimmune disease; e.g. rheumatoid arthritis, system lupus erythematosus (SLE or lupus), pemphigus vulgaris, and Sjogren's syndrome; inflammatory bowel disease, ulcerative colitis; transplant-related allospecific immunity disorders related to mucosal immunity; and unwanted immune responses towards biologics (e.g., Factor VIII) where humoral immunity is important. In embodiments, a non-cancer related indication associated with expression of BCMA includes but is not limited to, e.g., autoimmune disease, (e.g., lupus), inflammatory disorders (allergy and asthma) and transplantation. In some embodiments, the tumor antigen-expressing cell expresses, or at any time expressed, mRNA encoding the tumor antigen. In an embodiment, the tumor antigen-expressing cell produces the tumor antigen protein (e.g., wild-type or mutant), and the tumor antigen protein may be present at normal levels or reduced levels. In an embodiment, the tumor antigen-expressing cell produced detectable levels of a tumor antigen protein at one point, and subsequently produced substantially no detectable tumor antigen protein.

[0124] The phrase “disease associated with expression of CLL-1” includes, but is not limited to, a disease associated with a cell which expresses CLL-1 or condition associated with a cell which expresses CLL-1 including, e.g., proliferative diseases such as a cancer or malignancy or a precancerous condition such as a myelodysplasia, a myelodysplastic syndrome or a preleukemia; or a noncancer related indication associated with a cell which expresses CLL-1 (e.g., wild-type or mutant CLL-1). For the avoidance of doubt, a disease associated with expression of CLL-1 may include a condition associated with a cell which do not presently express CLL-1, e.g., because CLL-1 expression has been downregulated, e.g., due to treatment with a molecule targeting CLL-1, e.g., a CLL-1 inhibitor described herein, but which at one time expressed CLL-1. In one aspect, a cancer associated with expression of CLL-1 is a hematological cancer. In one aspect, a hematological cancer includes but is not limited to leukemia (such as acute myelogenous leukemia, chronic myelogenous leukemia, acute lymphoid leukemia, chronic lymphoid leukemia and myelodysplastic syndrome) and malignant lymphoproliferative conditions, including lymphoma (such as multiple myeloma, non-Hodgkin's lymphoma, Burkitt's lymphoma, and small cell- and large cell-follicular lymphoma). Further diseases associated with expression of CLL-1 expression include, but not limited to, e.g., atypical and/or non-classical cancers, malignancies, precancerous conditions or proliferative diseases associated with expression of CLL-1. Non-cancer related indications associated with expression of CLL-1 may also be included. In some embodiments, the tumor antigen-expressing cell expresses, or at any time expressed, mRNA encoding the tumor antigen. In an embodiment, the tumor antigen-expressing cell produces the tumor antigen protein (e.g., wild-type or mutant), and the tumor antigen protein may be present at normal levels or reduced levels. In an embodiment, the tumor antigen-expressing cell produced detectable levels of a tumor antigen protein at one point, and subsequently produced substantially no detectable tumor antigen protein.

[0125] The term “disease associated with expression of EGFRvIII” as used herein includes, but is not limited to, a disease associated with expression of EGFRvIII or condition associated with cells which express EGFRvIII including, tumor cells of various cancers such as, e.g., glioblastoma (including glioblastoma stem cells); breast, ovarian, and non-small cell lung carcinomas; head and neck squamous cell carcinoma; medulloblastoma, colorectal cancer, prostate cancer, and bladder carcinoma. Without being bound to a particular theory or mechanism, it is believed that by eliciting an antigen-specific response against EGFRvIII, the CARs disclosed herein provide for one or more of the following: targeting and destroying EGFRvIII-expressing tumor cells, reducing or eliminating tumors, facilitating infiltration of immune cells to the tumor site, and enhancing/extending anti-tumor responses. Because EGFRvIII is not expressed at detectable levels in normal (i.e., non-cancerous) tissue, it is contemplated that the inventive CARs advantageously substantially avoid targeting/destroying normal tissues and cells.

[0126] The phrase “disease associated with expression of mesothelin” as used herein includes, but is not limited to, a disease associated with expression of mesothelin or condition associated with cells which express mesothelin including, e.g., proliferative diseases such as a cancer or malignancy or a precancerous condition such as a mesothelial hyperplasia; or a noncancer related indication associated with cells which express mesothelin. Examples of various cancers that express mesothelin include but are not limited to, mesothelioma, ovarian cancer, pancreatic cancer, and the like.

[0127] The term “conservative sequence modifications” refers to amino acid modifications that do not significantly affect or alter the binding characteristics of the antibody or antibody fragment containing the amino acid sequence. Such conservative modifications include amino acid substitutions, additions and deletions. Modifications can be introduced into an antibody or antibody fragment of the invention by standard techniques known in the art, such as site-directed mutagenesis and PCR-mediated mutagenesis. Conservative amino acid substitutions are ones in which the amino acid residue is replaced with an amino acid residue having a similar side chain. Families of amino acid residues having similar side chains have been defined in the art. These families include amino acids with basic side chains (e.g., lysine, arginine, histidine), acidic side chains (e.g., aspartic acid, glutamic acid), uncharged polar side chains (e.g., glycine, asparagine, glutamine, serine, threonine, tyrosine, cysteine, tryptophan), nonpolar side chains (e.g., alanine, valine, leucine, isoleucine, proline, phenylalanine, methionine), beta-branched side chains (e.g., threonine, valine, isoleucine) and aromatic side chains (e.g., tyrosine, phenylalanine, tryptophan, histidine). Thus, one or more amino acid residues within a CAR of the invention can be replaced with other amino acid residues from the same side chain family and the altered CAR can be tested using the functional assays described herein.

[0128] The term “stimulation,” refers to a primary response induced by binding of a stimulatory molecule (e.g., a TCR/CD3 complex or CAR) with its cognate ligand (or tumor antigen in the case of a CAR) thereby mediating a signal transduction event, such as, but not limited to, signal transduction via the TCR/CD3 complex or signal transduction via the appropriate NK receptor or signaling domains of the CAR. Stimulation can mediate altered expression of certain molecules.

[0129] The term “stimulatory molecule,” refers to a molecule expressed by an immune cell (e.g., T cell, NK cell, B cell) that provides the cytoplasmic signaling sequence(s) that regulate activation of the immune cell in a stimulatory way for at least some aspect of the immune cell signaling pathway. In one aspect, the signal is a primary signal that is initiated by, for instance, binding of a TCR/CD3 complex with an MHC molecule loaded with peptide, and which leads to mediation of a T cell response, including, but not limited to, proliferation, activation, differentiation, and the like. A primary cytoplasmic signaling sequence (also referred to as a “primary signaling domain”) that acts in a stimulatory manner may contain a signaling motif which is known as immunoreceptor tyrosine-based activation motif or ITAM. Examples of an ITAM containing cytoplasmic signaling sequence that is of particular use in the invention includes, but is not limited to, those derived from CD3 zeta, common FcR gamma (FCER1G), Fc gamma RIIa, FcR beta (Fc Epsilon Rib), CD3 gamma, CD3 delta, CD3 epsilon, CD79a, CD79b, DAP10, and DAP12. In a specific CAR of the invention, the intracellular signaling domain in any one or more CARS of the invention comprises an intracellular signaling sequence, e.g., a primary signaling sequence of CD3-zeta. In a specific CAR of the invention, the primary signaling sequence of CD3-zeta is the sequence provided as SEQ ID NO: 17, or the equivalent residues from a non-human species, e.g., mouse, rodent, monkey, ape and the like. In a specific CAR of the invention, the primary signaling sequence of CD3-zeta is the sequence as provided in SEQ ID NO: 43, or the equivalent residues from a non-human species, e.g., mouse, rodent, monkey, ape and the like.

[0130] The term “antigen presenting cell” or “APC” refers to an immune system cell such as an accessory cell (e.g., a B-cell, a dendritic cell, and the like) that displays a foreign antigen complexed with major histocompatibility complexes (MHC's) on its surface. T-cells may recognize these complexes using their T-cell receptors (TCRs). APCs process antigens and present them to T-cells.

[0131] An “intracellular signaling domain,” as the term is used herein, refers to an intracellular portion of a molecule. The intracellular signaling domain generates a signal that promotes an immune effector function of the CAR containing cell, e.g., a CART cell. Examples of immune effector function, e.g., in a CART cell, include cytolytic activity and helper activity, including the secretion of cytokines.

[0132] In an embodiment, the intracellular signaling domain can comprise a primary intracellular signaling domain. Exemplary primary intracellular signaling domains include those derived from the molecules responsible for primary stimulation, or antigen dependent simulation. In an embodiment, the intracellular signaling domain can comprise a costimulatory intracellular domain. Exemplary costimulatory intracellular signaling domains include those derived from molecules responsible for costimulatory signals, or antigen independent stimulation. For example, in the case of a CART, a primary intracellular signaling domain can comprise a cytoplasmic sequence of a T cell receptor, and a costimulatory intracellular signaling domain can comprise cytoplasmic sequence from co-receptor or costimulatory molecule.

[0133] A primary intracellular signaling domain can comprise a signaling motif which is known as an immunoreceptor tyrosine-based activation motif or ITAM. Examples of ITAM containing primary cytoplasmic signaling sequences include, but are not limited to, those derived from CD3 zeta, common FcR gamma (FCER1G), Fc gamma RIIa, FcR beta (Fc Epsilon Rib), CD3 gamma, CD3 delta, CD3 epsilon, CD79a, CD79b, DAP10, and DAP12.

[0134] The term “zeta” or alternatively “zeta chain”, “CD3-zeta” or “TCR-zeta” is defined as the protein provided as GenBank Acc. No. BAG36664.1, or the equivalent residues from a non-human species, e.g., mouse, rodent, monkey, ape and the like, and a “zeta stimulatory domain” or alternatively a “CD3-zeta stimulatory domain” or a “TCR-zeta stimulatory domain” is defined as the amino acid residues from the cytoplasmic domain of the zeta chain, or functional derivatives thereof, that are sufficient to functionally transmit an initial signal necessary for T cell activation. In one aspect the cytoplasmic domain of zeta comprises residues 52 through 164 of GenBank Acc. No. BAG36664.1 or the equivalent residues from a non-human species, e.g., mouse, rodent, monkey, ape and the like, that are functional orthologs thereof. In one aspect, the “zeta stimulatory domain” or a “CD3-zeta stimulatory domain” is the sequence provided as SEQ ID NO:17. In one aspect, the “zeta stimulatory domain” or a “CD3-zeta stimulatory domain” is the sequence provided as SEQ ID NO:43.

[0135] The term “costimulatory molecule” refers to the cognate binding partner on a T cell that specifically binds with a costimulatory ligand, thereby mediating a costimulatory response by the T cell, such as, but not limited to, proliferation. Costimulatory molecules are cell surface molecules other than antigen receptors or their ligands that are contribute to an efficient immune response. Costimulatory molecules include, but are not limited to an MHC class I molecule, BTLA and a Toll ligand receptor, as well as OX40, CD27, CD28, CDS, ICAM-1, LFA-1 (CD11a/CD18), ICOS (CD278), and 4-1BB (CD137). Further examples of such costimulatory molecules include CDS, ICAM-1, GITR, BAFFR, HVEM (LIGHTR), SLAMF7, NKp80 (KLRF1), NKp44, NKp30, NKp46, CD160, CD19, CD4, CD8alpha, CD8beta, IL2R beta, IL2R gamma, IL7R alpha, ITGA4, VLA1, CD49a, ITGA4, IA4, CD49D, ITGA6, VLA-6, CD49f, ITGAD, CD11d, ITGAE, CD103, ITGAL, CD11a, LFA-1, ITGAM, CD11b, ITGAX, CD11c, ITGB1, CD29, ITGB2, CD18, LFA-1, ITGB7, NKG2D, NKG2C, TNFR2, TRANCE/RANKL, DNAM1 (CD226), SLAMF4 (CD244, 2B4), CD84, CD96 (Tactile), CEACAM1, CRTAM, Ly9 (CD229), CD160 (BY55), PSGL1, CD100 (SEMA4D), CD69, SLAMF6 (NTB-A, Ly108), SLAM (SLAMF1, CD150, IPO-3), BLAME (SLAMF8), SELPLG (CD162), LTBR, LAT, GADS, SLP-76, PAG/Cbp, CD19a, and a ligand that specifically binds with CD83.

[0136] A costimulatory intracellular signaling domain can be the intracellular portion of a costimulatory molecule. A costimulatory molecule can be represented in the following protein families: TNF receptor proteins, Immunoglobulin-like proteins, cytokine receptors, integrins, signaling lymphocytic activation molecules (SLAM proteins), and activating NK cell receptors. Examples of such molecules include CD27, CD28, 4-1BB (CD137), OX40, GITR, CD30, CD40, ICOS, BAFFR, HVEM, ICAM-1, lymphocyte function-associated antigen-1 (LFA-1), CD2, CDS, CD7, CD287, LIGHT, NKG2C, NKG2D, SLAMF7, NKp80, NKp30, NKp44, NKp46, CD160, B7-H3, and a ligand that specifically binds with CD83, and the like.

[0137] The intracellular signaling domain can comprise the entire intracellular portion, or the entire native intracellular signaling domain, of the molecule from which it is derived, or a functional fragment or derivative thereof.

[0138] The term “4-1BB” refers to a member of the TNFR superfamily with an amino acid sequence provided as GenBank Acc. No. AAA62478.2, or the equivalent residues from a non-human species, e.g., mouse, rodent, monkey, ape and the like; and a “4-1BB costimulatory domain” is defined as amino acid residues 214-255 of GenBank accno. AAA62478.2, or the equivalent residues from a non-human species, e.g., mouse, rodent, monkey, ape and the like. In one aspect, the “4-1BB costimulatory domain” is the sequence provided as SEQ ID NO:16 or the equivalent residues from a non-human species, e.g., mouse, rodent, monkey, ape and the like.

[0139] “Immune effector cell,” as that term is used herein, refers to a cell that is involved in an immune response, e.g., in the promotion of an immune effector response. Examples of immune effector cells include T cells, e.g., alpha/beta T cells and gamma/delta T cells, B cells, natural killer (NK) cells, natural killer T (NKT) cells, mast cells, and myeloic-derived phagocytes. Immune effector cells, e.g., T cells or NK cells, may be derived directly from a subject, or may be differentiated from cells derived from a subject (e.g., may be differentiated from stem cells, e.g., embryonic stem cells or induced pluripotent stem cells (iPSCs)).

[0140] “Immune effector function or immune effector response,” as that term is used herein, refers to function or response, e.g., of an immune effector cell, that enhances or promotes an immune attack of a target cell. E.g., an immune effector function or response refers a property of a T or NK cell that promotes killing or the inhibition of growth or proliferation, of a target cell. In the case of a T cell, primary stimulation and co-stimulation are examples of immune effector function or response.

[0141] The term “encoding” refers to the inherent property of specific sequences of nucleotides in a polynucleotide, such as a gene, a cDNA, or an mRNA, to serve as templates for synthesis of other polymers and macromolecules in biological processes having either a defined sequence of nucleotides (e.g., rRNA, tRNA and mRNA) or a defined sequence of amino acids and the biological properties resulting therefrom. Thus, a gene, cDNA, or RNA, encodes a protein if transcription and translation of mRNA corresponding to that gene produces the protein in a cell or other biological system. Both the coding strand, the nucleotide sequence of which is identical to the mRNA sequence and is usually provided in sequence listings, and the non-coding strand, used as the template for transcription of a gene or cDNA, can be referred to as encoding the protein or other product of that gene or cDNA.

[0142] Unless otherwise specified, a “nucleotide sequence encoding an amino acid sequence” includes all nucleotide sequences that are degenerate versions of each other and that encode the same amino acid sequence. The phrase nucleotide sequence that encodes a protein or a RNA may also include introns to the extent that the nucleotide sequence encoding the protein may in some version contain an intron(s).

[0143] The term “effective amount” or “therapeutically effective amount” are used interchangeably herein, and refer to an amount of a compound, formulation, material, or composition, as described herein effective to achieve a particular biological result. In one non-limiting embodiment, the term “a therapeutically effective amount” refers to the amount of the compound described herein that, when administered to a subject, is effective to (1) at least partially alleviate, inhibit, preventand/or ameliorate a condition, or a disorder or a disease (i) mediated by BTK, or (ii) associated with BTK activity, or (iii) characterized by activity (normal or abnormal) of BTK; or (2) reducing or inhibiting the activity of BTK; or (3) reducing or inhibiting the expression of BTK. In another non-limiting embodiment, the term “a therapeutically effective amount” refers to the amount of the compound described herein, that when administered to a cell, or a tissue, or a non-cellular biological material, or a medium, is effective to at least partially reducing or inhibiting the activity of BTK; or reducing or inhibiting the expression of BTK partially or completely.

[0144] The term “endogenous” refers to any material from or produced inside an organism, cell, tissue or system.

[0145] The term “exogenous” refers to any material introduced from or produced outside an organism, cell, tissue or system.

[0146] The term “expression” refers to the transcription and/or translation of a particular nucleotide sequence driven by a promoter.

[0147] The term “transfer vector” refers to a composition of matter which comprises an isolated nucleic acid and which can be used to deliver the isolated nucleic acid to the interior of a cell. Numerous vectors are known in the art including, but not limited to, linear polynucleotides, polynucleotides associated with ionic or amphiphilic compounds, plasmids, and viruses. Thus, the term “transfer vector” includes an autonomously replicating plasmid or a virus. The term should also be construed to further include non-plasmid and non-viral compounds which facilitate transfer of nucleic acid into cells, such as, for example, a polylysine compound, liposome, and the like. Examples of viral transfer vectors include, but are not limited to, adenoviral vectors, adeno-associated virus vectors, retroviral vectors, lentiviral vectors, and the like.

[0148] The term “expression vector” refers to a vector comprising a recombinant polynucleotide comprising expression control sequences operatively linked to a nucleotide sequence to be expressed. An expression vector comprises sufficient cis-acting elements for expression; other elements for expression can be supplied by the host cell or in an in vitro expression system. Expression vectors include all those known in the art, including cosmids, plasmids (e.g., naked or contained in liposomes) and viruses (e.g., lentiviruses, retroviruses, adenoviruses, and adeno-associated viruses) that incorporate the recombinant polynucleotide.

[0149] The term “lentivirus” refers to a genus of the Retroviridae family. Lentiviruses are unique among the retroviruses in being able to infect non-dividing cells; they can deliver a significant amount of genetic information into the DNA of the host cell, so they are one of the most efficient methods of a gene delivery vector. HIV, SIV, and FIV are all examples of lentiviruses.

[0150] The term “lentiviral vector” refers to a vector derived from at least a portion of a lentivirus genome, including especially a self-inactivating lentiviral vector as provided in Milone et al., Mol. Ther. 17(8): 1453-1464 (2009). Other examples of lentivirus vectors that may be used in the clinic, include but are not limited to, e.g., the LENTIVECTOR® gene delivery technology from Oxford BioMedica, the LENTIMAX™ vector system from Lentigen and the like. Nonclinical types of lentiviral vectors are also available and would be known to one skilled in the art.

[0151] The term “homologous” or “identity” refers to the subunit sequence identity between two polymeric molecules, e.g., between two nucleic acid molecules, such as, two DNA molecules or two RNA molecules, or between two polypeptide molecules. When a subunit position in both of the two molecules is occupied by the same monomeric subunit; e.g., if a position in each of two DNA molecules is occupied by adenine, then they are homologous or identical at that position. The homology between two sequences is a direct function of the number of matching or homologous positions; e.g., if half (e.g., five positions in a polymer ten subunits in length) of the positions in two sequences are homologous, the two sequences are 50% homologous; if 90% of the positions (e.g., 9 of 10), are matched or homologous, the two sequences are 90% homologous.

[0152] “Humanized” forms of non-human (e.g., murine) antibodies are chimeric immunoglobulins, immunoglobulin chains or fragments thereof (such as Fv, Fab, Fab′, F(ab′)2 or other antigen-binding subsequences of antibodies) which contain minimal sequence derived from non-human immunoglobulin. For the most part, humanized antibodies and antibody fragments thereof are human immunoglobulins (recipient antibody or antibody fragment) in which residues from a complementary-determining region (CDR) of the recipient are replaced by residues from a CDR of a non-human species (donor antibody) such as mouse, rat or rabbit having the desired specificity, affinity, and capacity. In some instances, Fv framework region (FR) residues of the human immunoglobulin are replaced by corresponding non-human residues. Furthermore, a humanized antibody/antibody fragment can comprise residues which are found neither in the recipient antibody nor in the imported CDR or framework sequences. These modifications can further refine and optimize antibody or antibody fragment performance. In general, the humanized antibody or antibody fragment thereof will comprise substantially all of at least one, and typically two, variable domains, in which all or substantially all of the CDR regions correspond to those of a non-human immunoglobulin and all or a significant portion of the FR regions are those of a human immunoglobulin sequence. The humanized antibody or antibody fragment can also comprise at least a portion of an immunoglobulin constant region (Fc), typically that of a human immunoglobulin. For further details, see Jones et al., Nature, 321: 522-525, 1986; Reichmann et al., Nature, 332: 323-329, 1988; Presta, Curr. Op. Struct. Biol., 2: 593-596, 1992.

[0153] “Fully human” refers to an immunoglobulin, such as an antibody or antibody fragment, where the whole molecule is of human origin or consists of an amino acid sequence identical to a human form of the antibody or immunoglobulin.

[0154] The term “isolated” means altered or removed from the natural state. For example, a nucleic acid or a peptide naturally present in a living animal is not “isolated,” but the same nucleic acid or peptide partially or completely separated from the coexisting materials of its natural state is “isolated.” An isolated nucleic acid or protein can exist in substantially purified form, or can exist in a non-native environment such as, for example, a host cell.

[0155] In the context of the present invention, the following abbreviations for the commonly occurring nucleic acid bases are used. “A” refers to adenosine, “C” refers to cytosine, “G” refers to guanosine, “T” refers to thymidine, and “U” refers to uridine.

[0156] The term “operably linked” or “transcriptional control” refers to functional linkage between a regulatory sequence and a heterologous nucleic acid sequence resulting in expression of the latter. For example, a first nucleic acid sequence is operably linked with a second nucleic acid sequence when the first nucleic acid sequence is placed in a functional relationship with the second nucleic acid sequence. For instance, a promoter is operably linked to a coding sequence if the promoter affects the transcription or expression of the coding sequence. Operably linked DNA sequences can be contiguous with each other and, e.g., where necessary to join two protein coding regions, are in the same reading frame.

[0157] The term “parenteral” administration of an immunogenic composition includes, e.g., subcutaneous (s.c.), intravenous (i.v.), intramuscular (i.m.), or intrasternal injection, intratumoral, or infusion techniques.

[0158] The term “nucleic acid” or “polynucleotide” refers to deoxyribonucleic acids (DNA) or ribonucleic acids (RNA) and polymers thereof in either single- or double-stranded form. Unless specifically limited, the term encompasses nucleic acids containing known analogues of natural nucleotides that have similar binding properties as the reference nucleic acid and are metabolized in a manner similar to naturally occurring nucleotides. Unless otherwise indicated, a particular nucleic acid sequence also implicitly encompasses conservatively modified variants thereof (e.g., degenerate codon substitutions), alleles, orthologs, SNPs, and complementary sequences as well as the sequence explicitly indicated. Specifically, degenerate codon substitutions may be achieved by generating sequences in which the third position of one or more selected (or all) codons is substituted with mixed-base and/or deoxyinosine residues (Batzer et al., Nucleic Acid Res. 19:5081 (1991); Ohtsuka et al., J. Biol. Chem. 260:2605-2608 (1985); and Rossolini et al., Mol. Cell. Probes 8:91-98 (1994)).

[0159] The terms “peptide,” “polypeptide,” and “protein” are used interchangeably, and refer to a compound comprised of amino acid residues covalently linked by peptide bonds. A protein or peptide must contain at least two amino acids, and no limitation is placed on the maximum number of amino acids that can comprise a protein's or peptide's sequence. Polypeptides include any peptide or protein comprising two or more amino acids joined to each other by peptide bonds. As used herein, the term refers to both short chains, which also commonly are referred to in the art as peptides, oligopeptides and oligomers, for example, and to longer chains, which generally are referred to in the art as proteins, of which there are many types. “Polypeptides” include, for example, biologically active fragments, substantially homologous polypeptides, oligopeptides, homodimers, heterodimers, variants of polypeptides, modified polypeptides, derivatives, analogs, fusion proteins, among others. A polypeptide includes a natural peptide, a recombinant peptide, or a combination thereof.

[0160] The term “promoter” refers to a DNA sequence recognized by the synthetic machinery of the cell, or introduced synthetic machinery, required to initiate the specific transcription of a polynucleotide sequence.

[0161] The term “promoter/regulatory sequence” refers to a nucleic acid sequence which is required for expression of a gene product operably linked to the promoter/regulatory sequence. In some instances, this sequence may be the core promoter sequence and in other instances, this sequence may also include an enhancer sequence and other regulatory elements which are required for expression of the gene product. The promoter/regulatory sequence may, for example, be one which expresses the gene product in a tissue specific manner.

[0162] The term “constitutive” promoter refers to a nucleotide sequence which, when operably linked with a polynucleotide which encodes or specifies a gene product, causes the gene product to be produced in a cell under most or all physiological conditions of the cell.

[0163] The term “inducible” promoter refers to a nucleotide sequence which, when operably linked with a polynucleotide which encodes or specifies a gene product, causes the gene product to be produced in a cell substantially only when an inducer which corresponds to the promoter is present in the cell.

[0164] The term “tissue-specific” promoter refers to a nucleotide sequence which, when operably linked with a polynucleotide encodes or specified by a gene, causes the gene product to be produced in a cell substantially only if the cell is a cell of the tissue type corresponding to the promoter.

[0165] The term “flexible polypeptide linker” or “linker” as used in the context of a scFv refers to a peptide linker that consists of amino acids such as glycine and/or serine residues used alone or in combination, to link variable heavy and variable light chain regions together. In one embodiment, the flexible polypeptide linker is a Gly/Ser linker and comprises the amino acid sequence (Gly-Gly-Gly-Ser)ₙ, where n is a positive integer equal to or greater than 1 (SEQ ID NO: 31). For example, n=1, n=2, n=3. n=4, n=5 and n=6, n=7, n=8, n=9 and n=10 (SEQ ID NO: 28). In one embodiment, the flexible polypeptide linkers include, but are not limited to, (Gly₄ Ser)₄ (SEQ ID NO: 29) or (Gly₄ Ser)₃ (SEQ ID NO: 30). In another embodiment, the linkers include multiple repeats of (Gly₂Ser), (GlySer) or (Gly₃Ser) (SEQ ID NO: 31). Also included within the scope of the invention are linkers described in WO2012/138475, incorporated herein by reference).

[0166] As used herein, a 5′ cap (also termed an RNA cap, an RNA 7-methylguanosine cap or an RNA m⁷G cap) is a modified guanine nucleotide that has been added to the “front” or 5′ end of a eukaryotic messenger RNA shortly after the start of transcription. The 5′ cap consists of a terminal group which is linked to the first transcribed nucleotide. Its presence is critical for recognition by the ribosome and protection from RNases. Cap addition is coupled to transcription, and occurs co-transcriptionally, such that each influences the other. Shortly after the start of transcription, the 5′ end of the mRNA being synthesized is bound by a cap-synthesizing complex associated with RNA polymerase. This enzymatic complex catalyzes the chemical reactions that are required for mRNA capping. Synthesis proceeds as a multi-step biochemical reaction. The capping moiety can be modified to modulate functionality of mRNA such as its stability or efficiency of translation.

[0167] As used herein, “in vitro transcribed RNA” refers to RNA, preferably mRNA, that has been synthesized in vitro. Generally, the in vitro transcribed RNA is generated from an in vitro transcription vector. The in vitro transcription vector comprises a template that is used to generate the in vitro transcribed RNA.

[0168] As used herein, a “poly(A)” is a series of adenosines attached by polyadenylation to the mRNA. In the preferred embodiment of a construct for transient expression, the polyA is between 50 and 5000 (SEQ ID NO: 2589), preferably greater than 64, more preferably greater than 100, most preferably greater than 300 or 400. poly(A) sequences can be modified chemically or enzymatically to modulate mRNA functionality such as localization, stability or efficiency of translation.

[0169] As used herein, “polyadenylation” refers to the covalent linkage of a polyadenylyl moiety, or its modified variant, to a messenger RNA molecule. In eukaryotic organisms, most messenger RNA (mRNA) molecules are polyadenylated at the 3′ end. The 3′ poly(A) tail is a long sequence of adenine nucleotides (often several hundred) added to the pre-mRNA through the action of an enzyme, polyadenylate polymerase. In higher eukaryotes, the poly(A) tail is added onto transcripts that contain a specific sequence, the polyadenylation signal. The poly(A) tail and the protein bound to it aid in protecting mRNA from degradation by exonucleases. Polyadenylation is also important for transcription termination, export of the mRNA from the nucleus, and translation. Polyadenylation occurs in the nucleus immediately after transcription of DNA into RNA, but additionally can also occur later in the cytoplasm. After transcription has been terminated, the mRNA chain is cleaved through the action of an endonuclease complex associated with RNA polymerase. The cleavage site is usually characterized by the presence of the base sequence AAUAAA near the cleavage site. After the mRNA has been cleaved, adenosine residues are added to the free 3′ end at the cleavage site.

[0170] As used herein, “transient” refers to expression of a non-integrated transgene for a period of hours, days or weeks, wherein the period of time of expression is less than the period of time for expression of the gene if integrated into the genome or contained within a stable plasmid replicon in the host cell.

[0171] The term “signal transduction pathway” refers to the biochemical relationship between a variety of signal transduction molecules that play a role in the transmission of a signal from one portion of a cell to another portion of a cell. The phrase “cell surface receptor” includes molecules and complexes of molecules capable of receiving a signal and transmitting signal across the membrane of a cell.

[0172] The term “subject” is intended to include living organisms in which an immune response can be elicited (e.g., mammals, human).

[0173] The term, a “substantially purified” cell refers to a cell that is essentially free of other cell types. A substantially purified cell also refers to a cell which has been separated from other cell types with which it is normally associated in its naturally occurring state. In some instances, a population of substantially purified cells refers to a homogenous population of cells. In other instances, this term refers simply to cell that have been separated from the cells with which they are naturally associated in their natural state. In some aspects, the cells are cultured in vitro. In other aspects, the cells are not cultured in vitro.

[0174] The term “therapeutic” as used herein means a treatment. A therapeutic effect is obtained by reduction, suppression, remission, or eradication of a disease state.

[0175] The term “prophylaxis” as used herein means the prevention of or protective treatment for a disease or disease state.

[0176] In the context of the present invention, “tumor antigen” or “hyperproliferative disorder antigen” or “antigen associated with a hyperproliferative disorder” refers to antigens that are common to specific hyperproliferative disorders. In certain aspects, the hyperproliferative disorder antigens of the present invention are derived from, cancers including but not limited to primary or metastatic melanoma, thymoma, lymphoma, sarcoma, lung cancer, liver cancer, non-Hodgkin lymphoma, Hodgkin lymphoma, leukemias, uterine cancer, cervical cancer, bladder cancer, kidney cancer and adenocarcinomas such as breast cancer, prostate cancer, ovarian cancer, pancreatic cancer, and the like.

[0177] The term “transfected” or “transformed” or “transduced” refers to a process by which exogenous nucleic acid is transferred or introduced into the host cell. A “transfected” or “transformed” or “transduced” cell is one which has been transfected, transformed or transduced with exogenous nucleic acid. The cell includes the primary subject cell and its progeny.

[0178] The term “specifically binds,” refers to an antibody, or a ligand, which recognizes and binds with a binding partner (e.g., a stimulatory tumor antigen) protein present in a sample, but which antibody or ligand does not substantially recognize or bind other molecules in the sample.

[0179] “Regulatable chimeric antigen receptor (RCAR),” as that term is used herein, refers to a set of polypeptides, typically two in the simplest embodiments, which when in a RCARX cell, provides the RCARX cell with specificity for a target cell, typically a cancer cell, and with regulatable intracellular signal generation or proliferation, which can optimize an immune effector property of the RCARX cell. An RCARX cell relies at least in part, on an antigen binding domain to provide specificity to a target cell that comprises the antigen bound by the antigen binding domain. In an embodiment, an RCAR includes a dimerization switch that, upon the presence of a dimerization molecule, can couple an intracellular signaling domain to the antigen binding domain.

[0180] “Membrane anchor” or “membrane tethering domain”, as that term is used herein, refers to a polypeptide or moiety, e.g., a myristoyl group, sufficient to anchor an extracellular or intracellular domain to the plasma membrane.

[0181] “Switch domain,” as that term is used herein, e.g., when referring to an RCAR, refers to an entity, typically a polypeptide-based entity, that, in the presence of a dimerization molecule, associates with another switch domain. The association results in a functional coupling of a first entity linked to, e.g., fused to, a first switch domain, and a second entity linked to, e.g., fused to, a second switch domain. A first and second switch domain are collectively referred to as a dimerization switch. In embodiments, the first and second switch domains are the same as one another, e.g., they are polypeptides having the same primary amino acid sequence, and are referred to collectively as a homodimerization switch. In embodiments, the first and second switch domains are different from one another, e.g., they are polypeptides having different primary amino acid sequences, and are referred to collectively as a heterodimerization switch. In embodiments, the switch is intracellular. In embodiments, the switch is extracellular. In embodiments, the switch domain is a polypeptide-based entity, e.g., FKBP or FRB-based, and the dimerization molecule is small molecule, e.g., a rapalogue. In embodiments, the switch domain is a polypeptide-based entity, e.g., an scFv that binds a myc peptide, and the dimerization molecule is a polypeptide, a fragment thereof, or a multimer of a polypeptide, e.g., a myc ligand or multimers of a myc ligand that bind to one or more myc scFvs. In embodiments, the switch domain is a polypeptide-based entity, e.g., myc receptor, and the dimerization molecule is an antibody or fragments thereof, e.g., myc antibody.

[0182] “Dimerization molecule,” as that term is used herein, e.g., when referring to an RCAR, refers to a molecule that promotes the association of a first switch domain with a second switch domain. In embodiments, the dimerization molecule does not naturally occur in the subject, or does not occur in concentrations that would result in significant dimerization. In embodiments, the dimerization molecule is a small molecule, e.g., rapamycin or a rapalogue, e.g, RAD001.

[0183] “Refractory” as used herein refers to a disease, e.g., cancer, that does not respond to a treatment. In embodiments, a refractory cancer can be resistant to a treatment before or at the beginning of the treatment. In other embodiments, the refractory cancer can become refractory during a treatment.

[0184] A “complete responder” as used herein refers to a subject having a disease, e.g., a cancer, who exhibits a complete response, e.g., a complete remission, to a treatment. A complete response may be identified, e.g., using the Cheson criteria as described herein.

[0185] A “partial responder” as used herein refers to a subject having a disease, e.g., a cancer, who exhibits a partial response, e.g., a partial remission, to a treatment. A partial response may be identified, e.g., using the Cheson criteria.

[0186] A “non-responder” as used herein refers to a subject having a disease, e.g., a cancer, who does not exhibit a response to a treatment, e.g., the patient has stable disease or progressive disease. A non-responder may be identified, e.g., using the Cheson criteria as described herein.

[0187] The term “relapse” as used herein refers to reappearance of a disease (e.g., cancer) after an initial period of responsiveness (e.g., complete response or partial response). The initial period of responsiveness may involve the level of cancer cells falling below a certain threshold, e.g., below 20%, 1%, 10%, 5%, 4%, 3%, 2%, or 1%. The reappearance may involve the level of cancer cells rising above a certain threshold, e.g., above 20%, 1%, 10%, 5%, 4%, 3%, 2%, or 1%. Relapse may be identified, e.g., using the Cheson criteria as described herein.

[0188] Ranges: throughout this disclosure, various aspects of the invention can be presented in a range format. It should be understood that the description in range format is merely for convenience and brevity and should not be construed as an inflexible limitation on the scope of the invention. Accordingly, the description of a range should be considered to have specifically disclosed all the possible subranges as well as individual numerical values within that range. For example, description of a range such as from 1 to 6 should be considered to have specifically disclosed subranges such as from 1 to 3, from 1 to 4, from 1 to 5, from 2 to 4, from 2 to 6, from 3 to 6 etc., as well as individual numbers within that range, for example, 1, 2, 2.7, 3, 4, 5, 5.3, and 6. As another example, a range such as 95-99% identity, includes something with 95%, 96%, 97%, 98% or 99% identity, and includes subranges such as 96-99%, 96-98%, 96-97%, 97-99%, 97-98% and 98-99% identity. This applies regardless of the breadth of the range.

### DESCRIPTION

[0189] Provided herein are compositions of matter and methods of use for the treatment of a disease such as cancer (e.g., a solid tumor or tumor associated with tumor associated macrophages) using immune effector cells (e.g., T cells or NK cells) that express a chimeric antigen receptor (CAR) (e.g., a CAR that targets an antigen on a solid tumor or antigen on a tumor associated with tumor associated macrophages). The methods include, inter alia, administering immune effector cells (e.g., T cells or NK cells) expressing a CAR described herein in combination with another agent such as an inhibitor of a pro-M2 macrophage molecule, e.g., an inhibitor of a pro-M2 macrophage molecule described herein, e.g., an anti-IL-13 antibody, an anti-IL-4 antibody or an anti-IL-13Rα1 antibody.

[0190] The present invention provides, at least in part, experiments supporting the high efficacy of a combination of a CAR therapy (e.g., a CAR that targets an antigen on a solid tumor or antigen on a tumor associated with tumor associated macrophages) and an inhibitor of a pro-M2 macrophage molecule. The combination of an inhibitor of a pro-M2 macrophage molecule, with a CAR therapy can increase efficacy of the combination therapy relative to a monotherapy of the inhibitor of a pro-M2 macrophage molecule, or a dose of CAR-expressing cells, or both. These beneficial effects can, for example, allow for a lower dose of the inhibitor of a pro-M2 macrophage molecule or the CAR-expressing cells, or both, while maintaining efficacy. The results herein are applicable to a wide range of cancers, e.g., solid tumors or tumors associated with tumor assoiciated macrophages. For example, lymphomas, such as Hodgkin lymphoma are known to be associated with MDSCs or TAMs, which may inhibit the function of the CAR-expressing immune effector cell against said lymphoma, e.g., a CD123 CAR. An immune effector cell (e.g., T cell or NK cell) that expresses a CD123 CAR, e.g., as described herein, targets cancers with CD123 surface expression (such as Hodgkin lymphoma). Alternatively or in combination with CD123 CAR, any other lymphoma-targeting CAR can be used in the combination therapies described herein. Therefore, the combination of a CAR therapy (e.g., one or more of a CD123 CAR, or other CAR targeting a lymphoma antigen) with an inhibitor of a pro-M2 macrophage molecule (e.g., as described herein) is suitable for treating a wide range of lymphomas (e.g., Hodgkin lymphoma). Similarly, an immune effector cell (e.g., T cell or NK cell) that expresses a CAR which targets an antigen on a solid tumor, e.g., as described herein, e.g., mesothelin or EGFRvIII, targets cancers with surface expression of the antigen. Therefore, the combination of a CAR therapy (e.g., one or more of a solid tumor-targeting CAR, e.g., a CAR targeting mesothelin or EGFRvIII, e.g., as described herein) with an inhibitor of a pro-M2 macrophage molecule (e.g., as described herein) is suitable for treating a wide range of solid tumors, e.g., a disease associated with expression on mesothelin or a disease associated with expression of EGFRvIII.

[0191] According to the present invention, an inhibitor of a pro-M2 macrophage molecule can reduce inhibition, e.g., macrophage-mediated inhibition, of immune effector cells, e.g., CAR-expressing tumor effector cells, e.g., as described herein, against a cancer, e.g., a solid tumor or tumor associated with MDSCs or TAMs. Without wishing to be bound by theory, certain lymphomas, such as Hodgkin lymphoma, and solid tumors are characterized by masses of cancerous cells associated with MDSCs or TAMs. CAR-expressing immune effector cells sometimes have difficulty penetrating these densely packed masses and their anti-cancer function may be impaired by the inhibitory tumor microenvironment, e.g., inhibited by MDSCs or TAMs. Thus, an inhibitor of a pro-M2 macrophage molecule may be administered in combination with a CAR-expressing cell therapy, making the cancer cells more vulnerable to the CAR-expressing cells.

[0192] In one aspect, the invention provides a number of chimeric antigen receptors (CAR) comprising an antibody or antibody fragment engineered for specific binding to an antigen expressed on a solid tumor or tumor associated with MDSCs or TAMs (e.g., in the case of Hodgkin lymphoma, the antigen being, e.g., CD123). In one aspect, the invention provides a cell (e.g., T cell) engineered to express a CAR, wherein the CAR T cell (“CART”) exhibits an anticancer property. In one aspect a cell is transformed with the CAR and the CAR is expressed on the cell surface. In some embodiments, the cell (e.g., T cell) is transduced with a viral vector encoding a CAR. In some embodiments, the viral vector is a retroviral vector. In some embodiments, the viral vector is a lentiviral vector. In some such embodiments, the cell may stably express the CAR. In another embodiment, the cell (e.g., T cell) is transfected with a nucleic acid, e.g., mRNA, cDNA, DNA, encoding a CAR. In some such embodiments, the cell may transiently express the CAR.

[0193] In one aspect, the antigen binding portion of the CAR is a scFv antibody fragment. In one aspect such antibody fragments are functional in that they retain the equivalent binding affinity, e.g., they bind the same antigen with comparable affinity, as the IgG antibody from which it is derived. In one aspect such antibody fragments are functional in that they provide a biological response that can include, but is not limited to, activation of an immune response, inhibition of signal-transduction origination from its target antigen, inhibition of kinase activity, and the like, as will be understood by a skilled artisan. In one aspect, the antigen binding domain of the CAR is a scFv antibody fragment that is humanized compared to the murine sequence of the scFv from which it is derived. In some aspects, the antibodies of the invention are incorporated into a chimeric antigen receptor (CAR).

[0194] In one aspect, the CAR or binding domain, e.g., a humanized scFv, portion of a CAR of the invention is encoded by a transgene whose sequence has been codon optimized for expression in a mammalian cell. In one aspect, entire CAR construct of the invention is encoded by a transgene whose entire sequence has been codon optimized for expression in a mammalian cell. Codon optimization refers to the discovery that the frequency of occurrence of synonymous codons (i.e., codons that code for the same amino acid) in coding DNA is biased in different species. Such codon degeneracy allows an identical polypeptide to be encoded by a variety of nucleotide sequences. A variety of codon optimization methods is known in the art, and include, e.g., methods disclosed in at least U.S. Pat. Nos. 5,786,464 and 6,114,148.

[0195] In one aspect, the CARs of the invention combine an antigen binding domain of a specific antibody with an intracellular signaling molecule. For example, in some aspects, the intracellular signaling molecule includes, but is not limited to, CD3-zeta chain, 4-1BB and CD28 signaling modules and combinations thereof.

[0196] Furthermore, the present invention provides CAR compositions and their use in medicaments or methods for treating, among other diseases, cancer or any malignancy or autoimmune diseases involving cells or tissues which express the target antigen recognized by the CAR.

[0197] In one aspect, the CAR of the invention can be used to eradicate target antigen-expressing normal cells, thereby applicable for use as a cellular conditioning therapy prior to cell transplantation. In one aspect, the target antigen-expressing normal cell is a CD19-expressing normal stem cell and the cell transplantation is a stem cell transplantation.

[0198] In one aspect, the invention provides a cell (e.g., T cell) engineered to express a chimeric antigen receptor (CAR), wherein the CAR-expressing cell, e.g., CAR T cell (“CART”), exhibits an anticancer property. With respect to anticancer peroperties against, e.g., Hodgkin lymphoma, a preferred antigen is CD123. In one aspect, the antigen binding domain of the CAR comprises a plurality of antigen-binding fragments. In one aspect, the antigen binding domain of the CAR comprises a plurality of antibody fragments comprising a scFv.

[0199] In one aspect, the CAR comprises at least one intracellular domain selected from the group of a CD137 (4-1BB) signaling domain, a CD28 signaling domain, a CD3zeta signaling domain, and any combination thereof. In one aspect, the CAR comprises at least one intracellular signaling domain is from one or more co-stimulatory molecule(s) other than a CD137 (4-1BB) or CD28.

### Chimeric Antigen Receptor (CAR)

[0200] The present invention encompasses a recombinant DNA construct comprising sequences encoding a CAR, wherein the CAR comprises an antibody or antibody fragment that binds specifically to an antigen (e.g., an antigen expressed on a solid tumor or tumor associated with MDSCs or TAMs), wherein the sequence of the antibody fragment is contiguous with and in the same reading frame as a nucleic acid sequence encoding an intracellular signaling domain. The intracellular signaling domain can comprise a costimulatory signaling domain and/or a primary signaling domain, e.g., a zeta chain. The costimulatory signaling domain refers to a portion of the CAR comprising at least a portion of the intracellular domain of a costimulatory molecule. In one embodiment, the antigen binding domain is a murine antibody or antibody fragment described herein. In one embodiment, the antigen binding domain is a humanized antibody or antibody fragment.

[0201] In one aspect an exemplary CAR construct, e.g., as described herein, comprises an optional leader sequence, an extracellular antigen binding domain, a hinge, a transmembrane domain, and an intracellular stimulatory domain. In one aspect an exemplary CAR construct comprises an optional leader sequence, an extracellular antigen binding domain, a hinge, a transmembrane domain, an intracellular costimulatory domain and an intracellular stimulatory domain. Specific CAR constructs containing murine, fully human and/or humanized scFv domains of the invention are provided below.

[0202] An exemplary leader sequence is provided as SEQ ID NO: 2. An exemplary hinge/spacer sequence is provided as SEQ ID NO: 4 or SEQ ID NO:6 or SEQ ID NO:8 or SEQ ID NO:10. An exemplary transmembrane domain sequence is provided as SEQ ID NO:12. An exemplary sequence of the intracellular signaling domain of the 4-1BB protein is provided as SEQ ID NO: 14. An exemplary sequence of the intracellular signaling domain of CD27 is provided as SEQ ID NO:16. An exemplary CD3zeta domain sequence is provided as SEQ ID NO: 18 or SEQ ID NO:20.

[0203] In one aspect, the present invention encompasses a recombinant nucleic acid construct comprising a nucleic acid molecule encoding a CAR, wherein the nucleic acid molecule comprises the nucleic acid sequence encoding an antigen binding domain, e.g., described herein, that is contiguous with and in the same reading frame as a nucleic acid sequence encoding an intracellular signaling domain. In one aspect, the present invention encompasses a recombinant nucleic acid construct comprising a transgene encoding a CAR, wherein the nucleic acid molecule comprises a nucleic acid sequence encoding an antigen binding domain, described herein. An exemplary intracellular signaling domain that can be used in the CAR includes, but is not limited to, one or more intracellular signaling domains of, e.g., CD3-zeta, CD28, 4-1BB, and the like. In some instances, the CAR can comprise any combination of CD3-zeta, CD28, 4-1BB, and the like.

[0204] The nucleic acid sequences coding for the desired molecules can be obtained using recombinant methods known in the art, such as, for example by screening libraries from cells expressing the gene, by deriving the gene from a vector known to include the same, or by isolating directly from cells and tissues containing the same, using standard techniques. Alternatively, the nucleic acid of interest can be produced synthetically, rather than cloned.

[0205] The present invention includes retroviral and lentiviral vector constructs expressing a CAR that can be directly transduced into a cell.

[0206] The present invention also includes an RNA construct that can be directly transfected into a cell. A method for generating mRNA for use in transfection involves in vitro transcription (IVT) of a template with specially designed primers, followed by polyA addition, to produce a construct containing 3′ and 5′ untranslated sequence (“UTR”), a 5′ cap and/or Internal Ribosome Entry Site (IRES), the nucleic acid to be expressed, and a polyA tail, typically 50-2000 bases in length (SEQ ID NO: 32) (e.g., SEQ ID NO:32-34 or SEQ ID NO:37-38). RNA so produced can efficiently transfect different kinds of cells. In one embodiment, the template includes sequences for the CAR. In an embodiment, an RNA CAR vector is transduced into a T cell by electroporation.

[0207] Sequences of non-limiting examples of various components that can be part of a CAR molecule described herein, are listed in Table 1, where “aa” stands for amino acids, and “na” stands for nucleic acids that encode the corresponding peptide.

TABLE 1
Sequences of various components of CAR (aa—amino acids, na—nucleic
acids that encodes the corresponding protein)

| SEQ | | |
|---|---|---|
| ID | | |
| NO | Description | Sequence |
| 1 | EF-1 promoter | CGTGAGGCTCCGGTGCCCGTCAGTGGGCAGAGCGCACATCGCC |
| | (na) | CACAGTCCCCGAGAAGTTGGGGGGAGGGGTCGGCAATTGAACC |
| | | GGTGCCTAGAGAAGGTGGCGCGGGGTAAACTGGGAAAGTGATG |
| | | TCGTGTACTGGCTCCGCCTTTTTCCCGAGGGTGGGGGAGAACCG |
| | | TATATAAGTGCAGTAGTCGCCGTGAACGTTCTTTTTCGCAACGG |
| | | GTTTGCCGCCAGAACACAGGTAAGTGCCGTGTGTGGTTCCCGCG |
| | | GGCCTGGCCTCTTTACGGGTTATGGCCCTTGCGTGCCTTGAATT |
| | | ACTTCCACCTGGCTGCAGTACGTGATTCTTGATCCCGAGCTTCG |
| | | GGTTGGAAGTGGGTGGGAGAGTTCGAGGCCTTGCGCTTAAGGA |
| | | GCCCCTTCGCCTCGTGCTTGAGTTGAGGCCTGGCCTGGGCGCTG |
| | | GGGCCGCCGCGTGCGAATCTGGTGGCACCTTCGCGCCTGTCTCG |
| | | CTGCTTTCGATAAGTCTCTAGCCATTTAAAATTTTTGATGACCTG |
| | | CTGCGACGCTTTTTTTCTGGCAAGATAGTCTTGTAAATGCGGGC |
| | | CAAGATCTGCACACTGGTATTTCGGTTTTTGGGGCCGCGGGCGG |
| | | CGACGGGGCCCGTGCGTCCCAGCGCACATGTTCGGCGAGGCGG |
| | | GGCCTGCGAGCGCGGCCACCGAGAATCGGACGGGGGTAGTCTC |
| | | AAGCTGGCCGGCCTGCTCTGGTGCCTGGCCTCGCGCCGCCGTGT |
| | | ATCGCCCCGCCCTGGGCGGCAAGGCTGGCCCGGTCGGCACCAG |
| | | TTGCGTGAGCGGAAAGATGGCCGCTTCCCGGCCCTGCTGCAGG |
| | | GAGCTCAAAATGGAGGACGCGGCGCTCGGGAGAGCGGGCGGG |
| | | TGAGTCACCCACACAAAGGAAAAGGGCCTTTCCGTCCTCAGCC |
| | | GTCGCTTCATGTGACTCCACGGAGTACCGGGCGCCGTCCAGGCA |
| | | CCTCGATTAGTTCTCGAGCTTTTGGAGTACGTCGTCTTTAGGTTG |
| | | GGGGGAGGGGTTTTATGCGATGGAGTTTCCCCACACTGAGTGG |
| | | GTGGAGACTGAAGTTAGGCCAGCTTGGCACTTGATGTAATTCTC |
| | | CTTGGAATTTGCCCTTTTTGAGTTTGGATCTTGGTTCATTCTCAA |
| | | GCCTCAGACAGTGGTTCAAAGTTTTTTTCTTCCATTTCAGGTGTC |
| | | GTGA |
| 2 | Leader (aa) | MALPVTALLLPLALLLHAARP |
| 3 | Leader (na) | ATGGCCCTGCCTGTGACAGCCCTGCTGCTGCCTCTGGCTCTGCT |
| | | GCTGCATGCCGCTAGACCC |
| | Leader codon | ATGGCCCTCCCTGTCACCGCCCTGCTGCTTCCGCTGGCTCTTCTG |
| | optimized (na) | CTCCACGCCGCTCGGCCC |
| 4 | CD 8 hinge | TTTPAPRPPTPAPTIASQPLSLRPEACRPAAGGAVHTRGLDFACD |
| | (aa) | |
| 5 | CD8 hinge | ACCACGACGCCAGCGCCGCGACCACCAACACCGGCGCCCACCA |
| | (na) | TCGCGTCGCAGCCCCTGTCCCTGCGCCCAGAGGCGTGCCGGCCA |
| | | GCGGCGGGGGGCGCAGTGCACACGAGGGGGCTGGACTTCGCCT |
| | | GTGAT |
| 6 | Ig4 hinge (aa) | ESKYGPPCPPCPAPEFLGGPSVFLFPPKPKDTLMISRTPEVTCVVVD |
| | | VSQEDPEVQFNWYVDGVEVHNAKTKPREEQFNSTYRVVSVLTVL |
| | | HQDWLNGKEYKCKVSNKGLPSSIEKTISKAKGQPREPQVYTLPPSQ |
| | | EEMTKNQVSLTCLVKGFYPSDIAVEWESNGQPENNYKTTPPVLDS |
| | | DGSFFLYSRLTVDKSRWQEGNVFSCSVMHEALHNHYTQKSLSLSL |
| | | GKM |
| 7 | Ig4 hinge (na) | GAGAGCAAGTACGGCCCTCCCTGCCCCCCTTGCCCTGCCCCCGA |
| | | GTTCCTGGGCGGACCCAGCGTGTTCCTGTTCCCCCCCAAGCCCA |
| | | AGGACACCCTGATGATCAGCCGGACCCCCGAGGTGACCTGTGT |
| | | GGTGGTGGACGTGTCCCAGGAGGACCCCGAGGTCCAGTTCAAC |
| | | TGGTACGTGGACGGCGTGGAGGTGCACAACGCCAAGACCAAGC |
| | | CCCGGGAGGAGCAGTTCAATAGCACCTACCGGGTGGTGTCCGT |
| | | GCTGACCGTGCTGCACCAGGACTGGCTGAACGGCAAGGAATAC |
| | | AAGTGTAAGGTGTCCAACAAGGGCCTGCCCAGCAGCATCGAGA |
| | | AAACCATCAGCAAGGCCAAGGGCCAGCCTCGGGAGCCCCAGGT |
| | | GTACACCCTGCCCCCTAGCCAAGAGGAGATGACCAAGAACCAG |
| | | GTGTCCCTGACCTGCCTGGTGAAGGGCTTCTACCCCAGCGACAT |
| | | CGCCGTGGAGTGGGAGAGCAACGGCCAGCCCGAGAACAACTAC |
| | | AAGACCACCCCCCCTGTGCTGGACAGCGACGGCAGCTTCTTCCT |
| | | GTACAGCCGGCTGACCGTGGACAAGAGCCGGTGGCAGGAGGGC |
| | | AACGTCTTTAGCTGCTCCGTGATGCACGAGGCCCTGCACAACCA |
| | | CTACACCCAGAAGAGCCTGAGCCTGTCCCTGGGCAAGATG |
| 8 | IgD hinge (aa) | RWPESPKAQASSVPTAQPQAEGSLAKATTAPATTRNTGRGGEEKK |
| | | KEKEKEEQEERETKTPECPSHTQPLGVYLLTPAVQDLWLRDKATF |
| | | TCFVVGSDLKDAHLTWEVAGKVPTGGVEEGLLERHSNGSQSQHS |
| | | RLTLPRSLWNAGTSVTCTLNHPSLPPQRLMALREPAAQAPVKLSL |
| | | NLLASSDPPEAASWLLCEVSGFSPPNILLMWLEDQREVNTSGFAPA |
| | | RPPPQPGSTTFWAWSVLRVPAPPSPQPATYTCVVSHEDSRTLLNAS |
| | | RSLEVSYVTDH |
| 9 | IgD hinge (na) | AGGTGGCCCGAAAGTCCCAAGGCCCAGGCATCTAGTGTTCCTA |
| | | CTGCACAGCCCCAGGCAGAAGGCAGCCTAGCCAAAGCTACTAC |
| | | TGCACCTGCCACTACGCGCAATACTGGCCGTGGCGGGGAGGAG |
| | | AAGAAAAAGGAGAAAGAGAAAGAAGAACAGGAAGAGAGGGA |
| | | GACCAAGACCCCTGAATGTCCATCCCATACCCAGCCGCTGGGC |
| | | GTCTATCTCTTGACTCCCGCAGTACAGGACTTGTGGCTTAGAGA |
| | | TAAGGCCACCTTTACATGTTTCGTCGTGGGCTCTGACCTGAAGG |
| | | ATGCCCATTTGACTTGGGAGGTTGCCGGAAAGGTACCCACAGG |
| | | GGGGGTTGAGGAAGGGTTGCTGGAGCGCCATTCCAATGGCTCT |
| | | CAGAGCCAGCACTCAAGACTCACCCTTCCGAGATCCCTGTGGA |
| | | ACGCCGGGACCTCTGTCACATGTACTCTAAATCATCCTAGCCTG |
| | | CCCCCACAGCGTCTGATGGCCCTTAGAGAGCCAGCCGCCCAGG |
| | | CACCAGTTAAGCTTAGCCTGAATCTGCTCGCCAGTAGTGATCCC |
| | | CCAGAGGCCGCCAGCTGGCTCTTATGCGAAGTGTCCGGCTTTAG |
| | | CCCGCCCAACATCTTGCTCATGTGGCTGGAGGACCAGCGAGAA |
| | | GTGAACACCAGCGGCTTCGCTCCAGCCCGGCCCCCACCCCAGCC |
| | | GGGTTCTACCACATTCTGGGCCTGGAGTGTCTTAAGGGTCCCAG |
| | | CACCACCTAGCCCCCAGCCAGCCACATACACCTGTGTTGTGTCC |
| | | CATGAAGATAGCAGGACCCTGCTAAATGCTTCTAGGAGTCTGG |
| | | AGGTTTCCTACGTGACTGACCATT |
| 10 | GS | GGGGSGGGGS |
| | hinge/linker | |
| | (aa) | |
| 11 | GS | GGTGGCGGAGGTTCTGGAGGTGGAGGTTCC |
| | hinge/linker | |
| | (na) | |
| 12 | CD8TM (aa) | IYIWAPLAGTCGVLLLSLVITLYC |
| 13 | CD8 TM (na) | ATCTACATCTGGGCGCCCTTGGCCGGGACTTGTGGGGTCCTTCT |
| | | CCTGTCACTGGTTATCACCCTTTACTGC |
| | CD8 TM, | ATCTACATTTGGGCCCCTCTGGCTGGTACTTGCGGGGTCCTGCT |
| | codon | GCTTTCACTCGTGATCACTCTTTACTGT |
| | optimized (na) | |
| 14 | 4-1BB | KRGRKKLLYIFKQPFMRPVQTTQEEDGCSCRFPEEEEGGCEL |
| | intracellular | |
| | domain (aa) | |
| 15 | 4-1BB | AAACGGGGCAGAAAGAAACTCCTGTATATATTCAAACAACCAT |
| | intracellular | TTATGAGACCAGTACAAACTACTCAAGAGGAAGATGGCTGTAG |
| | domain (na) | CTGCCGATTTCCAGAAGAAGAAGAAGGAGGATGTGAACTG |
| | 4-1BB | AAGCGCGGTCGGAAGAAGCTGCTGTACATCTTTAAGCAACCCTT |
| | intracellular | CATGAGGCCTGTGCAGACTACTCAAGAGGAGGACGGCTGTTCA |
| | domain, codon | TGCCGGTTCCCAGAGGAGGAGGAAGGCGGCTGCGAACTG |
| | optimized (na) | |
| 16 | CD27 | QRRKYRSNKGESPVEPAEPCRYSCPREEEGSTIPIQEDYRKPEPACSP |
| | intracellular | |
| | domain (aa) | |
| 17 | CD27 | AGGAGTAAGAGGAGCAGGCTCCTGCACAGTGACTACATGAACA |
| | intracellular | TGACTCCCCGCCGCCCCGGGCCCACCCGCAAGCATTACCAGCCC |
| | domain (na) | TATGCCCCACCACGCGACTTCGCAGCCTATCGCTCC |
| 18 | CD3-zeta (aa) | RVKFSRSADAPAYKQGQNQLYNELNLGRREEYDVLDKRRGRDPE |
| | | MGGKPRRKNPQEGLYNELQKDKMAEAYSEIGMKGERRRGKGHD |
| | | GLYQGLSTATKDTYDALHMQALPPR |
| 19 | CD3-zeta (na) | AGAGTGAAGTTCAGCAGGAGCGCAGACGCCCCCGCGTACAAGC |
| | | AGGGCCAGAACCAGCTCTATAACGAGCTCAATCTAGGACGAAG |
| | | AGAGGAGTACGATGTTTTGGACAAGAGACGTGGCCGGGACCCT |
| | | GAGATGGGGGGAAAGCCGAGAAGGAAGAACCCTCAGGAAGGC |
| | | CTGTACAATGAACTGCAGAAAGATAAGATGGCGGAGGCCTACA |
| | | GTGAGATTGGGATGAAAGGCGAGCGCCGGAGGGGCAAGGGGC |
| | | ACGATGGCCTTTACCAGGGTCTCAGTACAGCCACCAAGGACAC |
| | | CTACGACGCCCTTCACATGCAGGCCCTGCCCCCTCGC |
| 20 | CD3-zeta (aa) | RVKFSRSADAPAYQQGQNQLYNELNLGRREEYDVLDKRRGRDPE |
| | | MGGKPRRKNPQEGLYNELQKDKMAEAYSEIGMKGERRRGKGHD |
| | | GLYQGLSTATKDTYDALHMQALPPR |
| 21 | CD3-zeta (na) | AGAGTGAAGTTCAGCAGGAGCGCAGACGCCCCCGCGTACCAGC |
| | | AGGGCCAGAACCAGCTCTATAACGAGCTCAATCTAGGACGAAG |
| | | AGAGGAGTACGATGTTTTGGACAAGAGACGTGGCCGGGACCCT |
| | | GAGATGGGGGGAAAGCCGAGAAGGAAGAACCCTCAGGAAGGC |
| | | CTGTACAATGAACTGCAGAAAGATAAGATGGCGGAGGCCTACA |
| | | GTGAGATTGGGATGAAAGGCGAGCGCCGGAGGGGCAAGGGGC |
| | | ACGATGGCCTTTACCAGGGTCTCAGTACAGCCACCAAGGACAC |
| | | CTACGACGCCCTTCACATGCAGGCCCTGCCCCCTCGC |
| | CD3-zeta, | CGCGTGAAATTCAGCCGCAGCGCAGATGCTCCAGCCTACAAGC |
| | codon | AGGGGCAGAACCAGCTCTACAACGAACTCAATCTTGGTCGGAG |
| | optimized (na) | AGAGGAGTACGACGTGCTGGACAAGCGGAGAGGACGGGACCC |
| | | AGAAATGGGCGGGAAGCCGCGCAGAAAGAATCCCCAAGAGGG |
| | | CCTGTACAACGAGCTCCAAAAGGATAAGATGGCAGAAGCCTAT |
| | | AGCGAGATTGGTATGAAAGGGGAACGCAGAAGAGGCAAAGGC |
| | | CACGACGGACTGTACCAGGGACTCAGCACCGCCACCAAGGACA |
| | | CCTATGACGCTCTTCACATGCAGGCCCTGCCGCCTCGG |
| 22 | linker | GGGGS |
| 23 | linker | GGTGGCGGAGGTTCTGGAGGTGGAGGTTCC |
| 24 | PD-1 | Pgwfldspdrpwnpptfspallvvtegdnatftcsfsntsesfylnwyrmspsnqtdklaafpedrsqp |
| | extracellular | gqdcrfrvtqlpngrdfhmsvvrarrndsgtylcgaislapkaqikeslraelryterraevptahpspsp |
| | domain (aa) | rpagqfqtlv |
| 25 | PD-1 | Cccggatggtttctggactctccggatcgcccgtggaatcccccaaccttctcaccggcactcttggttgtg |
| | extracellular | actgagggcgataatgcgaccttcacgtgctcgttctccaacacctccgaatcattcgtgctgaactggtac |
| | domain (na) | cgcatgagcccgtcaaaccagaccgacaagctcgccgcgtttccggaagatcggtcgcaaccgggaca |
| | | ggattgtcggttccgcgtgactcaactgccgaatggcagagacttccacatgagcgtggtccgcgctagg |
| | | cgaaacgactccgggacctacctgtgcggagccatctcgctggcgcctaaggcccaaatcaaagagag |
| | | cttgagggccgaactgagagtgaccgagcgcagagctgaggtgccaactgcacatccatccccatcgcc |
| | | tcggcctgcggggcagtttcagaccctggtc |
| 26 | PD-1 CAR | Malpvtalllplalllhaarppgwfldspdrpwnpptfspallvvtegdnatftcsfsntsesfylnwyr |
| | (aa) with | mspsnqtdklaafpedrsqpgqdcrfrvtqlpngrdfhmsvvrarrndsgtylcgaislapkaqikesl |
| | signal | raelryterraevptahpspsprpagqfqtlvtapaprpptpaptiasqplslrpeacrpaaggavhtrgl |
| | | dfacdiyiwaplagtcgvlllslvitlyckrgrkkllyiflcqpfmrpvqttqeedgcscrfpeeeeggcelr |
| | | vkfsrsadapaykqgqnqlynelnlgrreeydvldkagrdpemggkprrknpqeglynelqkdkm |
| | | aeayseigmkgerrrgkghdglyqglstatkdtydalhmqalppr |
| 27 | PD-1 CAR | Atggccctccctgtcactgccctgcttctccccctcgcactcctgctccacgccgctagaccacccggatg |
| | (na) | gtttctggactctccggatcgcccgtggaatcccccaaccttctcaccggcactcttggttgtgactgaggg |
| | | cgataatgcgaccttcacgtgctcgttctccaacacctccgaatcattcgtgctgaactggtaccgcatgag |
| | | cccgtcaaaccagaccgacaagctcgccgcgtttccggaagatcggtcgcaaccgggacaggattgtcg |
| | | gttccgcgtgactcaactgccgaatggcagagacttccacatgagcgtggtccgcgctaggcgaaacga |
| | | ctccgggacctacctgtgcggagccatctcgctggcgcctaaggcccaaatcaaagagagcttgagggc |
| | | cgaactgagagtgaccgagcgcagagctgaggtgccaactgcacatccatccccatcgcctcggcctgc |
| | | ggggcagtttcagaccctggtcacgaccactccggcgccgcgcccaccgactccggccccaactatcg |
| | | cgagccagcccctgtcgctgaggccggaagcatgccgccctgccgccggaggtgctgtgcatacccgg |
| | | ggattggacttcgcatgcgacatctacatttgggctcctctcgccggaacttgtggcgtgctccttctgtccct |
| | | ggtcatcaccctgtactgcaagcggggtcggaaaaagcttctgtacattttcaagcagcccttcatgaggc |
| | | ccgtgcaaaccacccaggaggaggacggttgctcctgccggttccccgaagaggaagaaggaggttgc |
| | | gagctgcgcgtgaagttctcccggagcgccgacgcccccgcctataagcagggccagaaccagctgta |
| | | caacgaactgaacctgggacggcgggaagagtacgatgtgctggacaagcggcgcggccgggaccc |
| | | cgaaatgggcgggaagcctagaagaaagaaccctcaggaaggcctgtataacgagctgcagaaggac |
| | | aagatggccgaggcctactccgaaattgggatgaagggagagcggcggaggggaaaggggcacgac |
| | | ggcctgtaccaaggactgtccaccgccaccaaggacacatacgatgccctgcacatgcaggcccttccc |
| | | cctcgc |
| 28 | linker | (Gly-Gly-Gly-Ser)ₙ, where n = 1-10 |
| 29 | linker | (Gly₄ Ser)₄ |
| 30 | linker | (Gly₄ Ser)₃ |
| 31 | linker | (Gly₃Ser) |
| 32 | polyA (2000 | [a]₂₀₀₀ |
| | A's) | |
| 33 | polyA (150 | [a]₁₅₀ |
| | A's) | |
| 34 | polyA (5000 | [a]₅₀₀₀ |
| | A's) | |
| 35 | polyA (100 | [t]₁₀₀ |
| | T's) | |
| 36 | polyA (500 | [t]₅₀₀ |
| | T's) | |
| 37 | polyA (64 | [a]₆₄ |
| | A's) | |
| 38 | polyA (400 | [a]₄₀₀ |
| | A's) | |
| 39 | PD1 CAR (aa) | Pgwfldspdrpwnpptfspallvvtegdnatftcsfsntsesfylnwyrmspsnqtdklaafpedrsqp |
| | | gqdcrfrvtqlpngrdfhmsvvrarrndsgtylcgaislapkaqikeslraelryterraevptahpspsp |
| | | rpagqfqtlvtapaprpptpaptiasqplslrpeacrpaaggavhtrgldfacdiyiwaplagtcgvlllsl |
| | | vitlyckrgrkkllyifkqpfmrpvqttqeedgcscrfpeeeeggcelrvkfsrsadapaykqgqnqly |
| | | nelnlgrreeydvldlargrdpemggkprrknpqeglynelqkdkmaeayseigmkgeragkghd |
| | | glyqglstatkdtydalhmqalppr |
| 40 | ICOS | T K K K Y S S S V H D P N G E Y M F M R A V N T A K K S |
| | intracellular | R L T D V T L |
| | domain (aa) | |
| 41 | ICOS | ACAAAAAAGAAGTATTCATCCAGTGTGCACGACCCTAACGGTGAATACATGTTCA |
| | intracellular | TGAGAGCAGTGAACACAGCCAAAAAATCCAGACTCACAGATGTGACCCTA |
| | domain (na) | |
| 42 | ICOS TM | T T T P A P R P P T P A P T I A S Q P L S L R P E A C R |
| | domain (aa) | P A A G G A V H T R G L D F A C D F W L P I G C A A F V |
| | | V V C I L G C I L I C W L |
| 43 | ICOS TM | ACCACGACGCCAGCGCCGCGACCACCAACACCGGCGCCCACCATCGCGTCGCAGC |
| | domain (na) | CCCTGTCCCTGCGCCCAGAGGCGTGCCGGCCAGCGGCGGGGGGCGCAGTGCACAC |
| | | GAGGGGGCTGGACTTCGCCTGTGATTTCTGGTTACCCATAGGATGTGCAGCCTTT |
| | | GTTGTAGTCTGCATTTTGGGATGCATACTTATTTGTTGGCTT |
| 44 | CD28 | RSKRSRLLHSDYMNMTPRRPGPTRKHYQPYAPPRDFAAYRS |
| | intracellular | |
| | domain (aa) | |
| 45 | CD28 | AGGAGTAAGAGGAGCAGGCTCCTGCACAGTGACTACATGAACATGACTCCCCGCC |
| | intracellular | GCCCCGGGCCCACCCGCAAGCATTACCAGCCCTATGCCCCACCACGCGACTTCGC |
| | domain (na) | AGCCTATCGCTCC |

### Antigen Binding Domains and CARs

[0208] In one aspect, the CAR of the invention comprises a target-specific binding element otherwise referred to as an antigen binding domain. The choice of moiety depends upon the type and number of ligands that define the surface of a target cell. For example, the antigen binding domain may be chosen to recognize a ligand that acts as a cell surface marker on target cells associated with a particular disease state. Thus examples of cell surface markers that may act as ligands for the antigen binding domain in a CAR of the invention include those associated with viral, bacterial and parasitic infections, autoimmune disease and cancer cells.

[0209] In one aspect, the CAR-mediated T-cell response can be directed to an antigen of interest by way of engineering an antigen binding domain that specifically binds a desired antigen into the CAR.

[0210] In one aspect, the CAR comprises an antigen binding domain which targets a solid tumor antigen. In one aspect the CAR comprises an antigen binding domain which targets a tumor antigen expressed on a tumor associated with MDSCs or TAMs, e.g., Hodgkin lymphoma.

[0211] The antigen binding domain can be any domain that binds to the antigen including but not limited to a monoclonal antibody, a polyclonal antibody, a recombinant antibody, a murine antibody, a human antibody, a humanized antibody, and a functional fragment thereof, including but not limited to a single-domain antibody such as a heavy chain variable domain (VH), a light chain variable domain (VL) and a variable domain (VHH) of camelid derived nanobody, and to an alternative scaffold known in the art to function as antigen binding domain, such as a recombinant fibronectin domain, and the like.

[0212] In an embodiment, the antigen binding domain of a CAR binds to human mesothelin. In an embodiment, the antigen binding domain is a murine scFv domain that binds to human mesothelin, e.g., SS1 or SEQ ID NO: 46. In an embodiment, the antigen binding domain is a humanized antibody or antibody fragment, e.g., scFv domain, derived from the murine SS1 scFv. In an embodiment, the antigen binding domain is a human antibody or antibody fragment that binds to human mesothelin. Exemplary human scFv domains (and their sequences) and the murine SS1 scFv that bind to mesothelin are provided in Table 2. CDR sequences are underlined. The scFv domain sequences provided in Table 2 include a light chain variable region (VL) and a heavy chain variable region (VH). The VL and VH are attached by a linker comprising the sequence GGGGSGGGGSGGGGS (SEQ ID NO: 30) (e.g., as shown in SS1 scFv domains) or GGGGSGGGGSGGGGSGGGGS (SEQ ID NO: 29) (e.g., as shown in M1, M2, M3, M4, M5, M6, M7, M8, M9, M10, M11, M12, M13, M14, M15, M16, M17, M18, M19, M20, M21, M22, M23, or M24 scFv domains). The scFv domains listed in Table 2 are in the following orientation: VL-linker-VH.

TABLE 2
Examples of antigen binding domains that bind to mesothelin

| | | | SEQ |
|---|---|---|---|
| Tumor | | | ID |
| antigen | Name | Amino acid sequence | NO: |
| mesothelin | M5 | QVQLVQSGAEVEKPGASVKVSCKASGYTFTDYYMHWVRQAPGQGLEWMGW | 51 |
| | (human) | INPNSGGTNYAQKFQGRVTMTRDTSISTAYMELSRLRSDDTAVYYCASGW | |
| | | DFDYWGQGTLVTVSSGGGGSGGGGSGGGGSGGGGSDIVMTQSPSSLSASV | |
| | | GDRVTITCRASQSIRYYLSWYQQKPGKAPKLLIYTASILQNGVPSRFSGS | |
| | | GSGTDFTLTISSLQPEDFATYYCLQTYTTPDFGPGTKVEIK | |
| mesothelin | M11 | QVQLQQSGAEVKKPGASVKVSCKASGYTFTGYYMHWVRQAPGQGLEWMGW | 57 |
| | (human) | INPNSGGTNYAQNFQGRVTMTRDTSISTAYMELRRLRSDDTAVYYCASGW | |
| | | DFDYWGQGTLVTVSSGGGGSGGGGSGGGGSGGGGSDIRMTQSPSSLSASV | |
| | | GDRVTITCRASQSIRYYLSWYQQKPGKAPKLLIYTASILQNGVPSRFSGS | |
| | | GSGTDFTLTISSLQPEDFATYYCLQTYTTPDFGPGTKVEIK | |
| mesothelin | ss1 | Q V Q L Q Q S G P E L E K P G A S V K I S C K A S | 46 |
| | (murine) | G Y S F T G Y T M N W V K Q S H G K S L E W I G L | |
| | | I T P Y N G A S S Y N Q K F R G K A T L T V D K S | |
| | | S S T A Y M D L L S L T S E D S A V Y F C A R G G | |
| | | Y D G R G F D Y W G Q G T T V T V S S G G G G S G | |
| | | G G G S G G G G S D I E L T Q S P A I M S A S P G | |
| | | E K V T M T C S A S S S V S Y M H W Y Q Q K S G T | |
| | | S P K R W I Y D T S K L A S G V P G R F S G S G S | |
| | | G N S Y S L T I S S V E A E D D A T Y Y C Q Q W S | |
| | | G Y P L T F G A G T K L E I | |
| mesothelin | M1 | QVQLQQSGAEVKKPGASVKVSCKASGYTFTGYYMHWVRQAPGQGLEWMGR | 47 |
| | (human) | INPNSGGTNYAQKFQGRVTMTRDTSISTAYMELSRLRSEDTAVYYCARGR | |
| | | YYGMDVWGQGTMVTVSSGGGGSGGGGSGGGGSGGGGSEIVLTQSPATLSL | |
| | | SPGERATISCRASQSVSSNFAWYQQRPGQAPRLLIYDASNRATGIPPRFS | |
| | | GSGSGTDFTLTISSLEPEDFAAYYCHQRSNWLYTFGQGTKVDIK | |
| mesothelin | M2 | QVQLVQSGAEVKKPGASVKVSCKASGYTFTGYYMHWVRQAPGQGLEWMGW | 48 |
| | (human) | INPNSGGTNYAQKFQGRVTMTRDTSISTAYMELSRLRSDDTAVYYCARDL | |
| | | RRTVVTPRAYYGMDVWGQGTTVTVSSGGGGSGGGGSGGGGSGGGGSDIQL | |
| | | TQSPSTLSASVGDRVTITCQASQDISNSLNWYQQKAGKAPKLLIYDASTL | |
| | | ETGVPSRFSGSGSGTDFSFTISSLQPEDIATYYCQQHDNLPLTFGQGTKV | |
| | | EIK | |
| mesothelin | M3 | QVQLVQSGAEVKKPGAPVKVSCKASGYTFTGYYMHWVRQAPGQGLEWMGW | 49 |
| | (human) | INPNSGGTNYAQKFQGRVTMTRDTSISTAYMELSRLRSDDTAVYYCARGE | |
| | | WDGSYYYDYWGQGTLVTVSSGGGGSGGGGSGGGGSGGGGSDIVLTQTPSS | |
| | | LSASVGDRVTITCRASQSINTYLNWYQHKPGKAPKLLIYAASSLQSGVPS | |
| | | RFSGSGSGTDFTLTISSLQPEDFATYYCQQSFSPLTFGGGTKLEIK | |
| mesothelin | M4 | QVQLVESGGGLVQPGGSLRLSCAASGFTFSSYWMHWVRQVPGKGLVWVSR | 50 |
| | (human) | INTDGSTTTYADSVEGRFTISRDNAKNTLYLQMNSLRDDDTAVYYCVGGH | |
| | | WAVWGQGTTVTVSSGGGGSGGGGSGGGGSGGGGSDIQMTQSPSTLSASVG | |
| | | DRVTITCRASQSISDRLAWYQQKPGKAPKLLIYKASSLESGVPSRFSGSG | |
| | | SGTEFTLTISSLQPDDFAVYYCQQYGHLPMYTFGQGTKVEIK | |
| mesothelin | M6 | QVQLVQSGAEVKKPGASVKVSCKASGYTFTSYYMHWVRQAPGQGLEWMGI | 52 |
| | (human) | INPSGGSTSYAQKFQGRVTMTRDTSTSTVYMELSSLRSEDTAVYYCARYR | |
| | | LIAVAGDYYYYGMDVWGQGTMVTVSSGGGGSGGGGSGGGGSGGGGSDIQM | |
| | | TQSPSSVASVGDRVTITCRASQGVGRWLAWYQQKPGTAPKLLIYAASTLQ | |
| | | SGVPSRFSGSGSGTDFTLTINNLQPEDFATYYCQQANSFPLTFGGGTRLE | |
| | | IK | |
| mesothelin | M7 | QVQLVQSGGGVVQPGRSLRLSCAASGFTFSSYAMHWVRQAPGKGLEWVAV | 53 |
| | (human) | ISYDGSNKYYADSVKGRFTISRDNSKNTLYLQMNSLRAEDTAVYYCARWK | |
| | | VSSSSPAFDYWGQGTLVTVSSGGGGSGGGGSGGGGSGGGGSEIVLTQSPA | |
| | | TLSLSPGERAILSCRASQSVYTKYLGWYQQKPGQAPRLLIYDASTRATGI | |
| | | PDRFSGSGSGTDFTLTINRLEPEDFAVYYCQHYGGSPLITFGQGTRLEIK | |
| mesothelin | M8 | QVQLQQSGAEVKKPGASVKVSCKTSGYPFTGYSLHWVRQAPGQGLEWMGW | 54 |
| | (human) | INPNSGGTNYAQKFQGRVTMTRDTSISTAYMELSRLRSDDTAVYYCARDH | |
| | | YGGNSLFYWGQGTLVTVSSGGGGSGGGGSGGGGSGGGGSDIQLTQSPSSI | |
| | | SASVGDTVSITCRASQDSGTWLAWYQQKPGKAPNLLMYDASTLEDGVPSR | |
| | | FSGSASGTEFTLTVNRLQPEDSATYYCQQYNSYPLTFGGGTKVDIK | |
| mesothelin | M9 | QVQLVQSGAEVKKPGASVEVSCKASGYTFTSYYMHWVRQAPGQGLEWMGI | 55 |
| | (human) | INPSGGSTGYAQKFQGRVTMTRDTSTSTVHMELSSLRSEDTAVYYCARGG | |
| | | YSSSSDAFDIWGQGTMVTVSSGGGGSGGGGSGGGGSGGGGSDIQMTQSPP | |
| | | SLSASVGDRVTITCRASQDISSALAWYQQKPGTPPKLLIYDASSLESGVP | |
| | | SRFSGSGSGTDFTLTISSLQPEDFATYYCQQFSSYPLTFGGGTRLEIK | |
| mesothelin | M10 | QVQLVQSGAEVKKPGASVKVSCKASGYTFTSYGISWVRQAPGQGLEWMGW | 56 |
| | (human) | ISAYNGNTNYAQKLQGRVTMTTDTSTSTAYMELRSLRSDDTAVYYCARVA | |
| | | GGIYYYYGMDVWGQGTTITVSSGGGGSGGGGSGGGGSGGGGSDIVMTQTP | |
| | | DSLAVSLGERATISCKSSHSVLYNRNNKNYLAWYQQKPGQPPKLLFYWAS | |
| | | TRKSGVPDRFSGSGSGTDFTLTISSLQPEDFATYFCQQTQTFPLTFGQGT | |
| | | RLEIN | |
| mesothelin | M12 | QVQLVQSGAEVKKPGASVKVSCKASGYTFTGYYMHWVRQAPGQGLEWMGR | 58 |
| | (human) | INPNSGGTNYAQKFQGRVTMTTDTSTSTAYMELRSLRSDDTAVYYCARTT | |
| | | TSYAFDIWGQGTMVTVSSGGGGSGGGGSGGGGSGGGGSDIQLTQSPSTLS | |
| | | ASVGDRVTITCRASQSISTWLAWYQQKPGKAPNLLIYKASTLESGVPSRF | |
| | | SGSGSGTEFTLTISSLQPDDFATYYCQQYNTYSPYTFGQGTKLEIK | |
| mesothelin | M13 | QVQLVQSGGGLVKPGGSLRLSCEASGFIFSDYYMGWIRQAPGKGLEWVSY | 59 |
| | (human) | IGRSGSSMYYADSVKGRFTFSRDNAKNSLYLQMNSLRAEDTAVYYCAASP | |
| | | VVAATEDFQHWGQGTLVTVSSGGGGSGGGGSGGGGSGGGGSDIVMTQTPA | |
| | | TLSLSPGERATLSCRASQSVTSNYLAWYQQKPGQAPRLLLFGASTRATGI | |
| | | PDRFSGSGSGTDFTLTINRLEPEDFAMYYCQQYGSAPVTFGQGTKLEIK | |
| mesothelin | M14 | QVQLVQSGAEVRAPGASVKISCKASGFTFRGYYIHWVRQAPGQGLEWMGI | 60 |
| | (human) | INPSGGSRAYAQKFQGRVTMTRDTSTSTVYMELSSLRSDDTAMYYCARTA | |
| | | SCGGDCYYLDYWGQGTLVTVSSGGGGSGGGGSGGGGSGGGGSDIQMTQSP | |
| | | PTLSASVGDRVTITCRASENVNIWLAWYQQKPGKAPKLLIYKSSSLASGV | |
| | | PSRFSGSGSGAEFTLTISSLQPDDFATYYCQQYQSYPLTFGGGTKVDIK | |
| mesothelin | M15 | QVQLVQSGGGLVQPGRSLRLSCAASGFTFDDYAMHWVRQAPGKGLEWVSG | 61 |
| | (human) | ISWNSGSIGYADSVKGRFTISRDNAKNSLYLQMNSLRAEDTAVYYCAKDG | |
| | | SSSWSWGYFDYWGQGTLVTVSSGGGGSGGGGSGGGGSSSELTQDPAVSVA | |
| | | LGQTVRTTCQGDALRSYYASWYQQKPGQAPMLVIYGKNNRPSGIPDRFSG | |
| | | SDSGDTASLTITGAQAEDEADYYCNSRDSSGYPVFGTGTKVTVL | |
| mesothelin | M16 | EVQLVESGGGLVQPGRSLRLSCAASGFTFDDYAMHWVRQAPGKGLEWVSG | 62 |
| | (human) | ISWNSGSTGYADSVKGRFTISRDNAKNSLYLQMNSLRAEDTALYYCAKDS | |
| | | SSWYGGGSAFDIWGQGTMVTVSSGGGGSGGGGSGGGGSSSELTQEPAVSV | |
| | | ALGQTVRITCQGDSLRSYYASWYQQKPGQAPVLVIFGRSRRPSGIPDRFS | |
| | | GSSSGNTASLIITGAQAEDEADYYCNSRDNTANHYVFGTGTKLTVL | |
| mesothelin | M17 | EVQLVESGGGLVQPGRSLRLSCAASGFTFDDYAMHWVRQAPGKGLEWVSG | 63 |
| | (human) | ISWNSGSTGYADSVKGRFTISRDNAKNSLYLQMNSLRAEDTALYYCAKDS | |
| | | SSWYGGGSAFDIWGQGTMVTVSSGGGGSGGGGSGGGGSSSELTQDPAVSV | |
| | | ALGQTVRITCQGDSLRSYYASWYQQKPGQAPVLVIYGKNNRPSGIPDRFS | |
| | | GSSSGNTASLTITGAQAEDEADYYCNSRGSSGNHYVFGTGTKVTVL | |
| mesothelin | M18 | QVQLVQSGGGLVQPGGSLRLSCAASGFTFSSYWMHWVRQAPGKGLVWVSR | 64 |
| | (human) | INSDGSSTSYADSVKGRFTISRDNAKNTLYLQMNSLRAEDTAVYYCVRTG | |
| | | WVGSYYYYMDVWGKGTTVTVSSGGGGSGGGGSGGGGSGGGGSEIVLTQSP | |
| | | GTLSLSPGERATLSCRASQSVSSNYLAWYQQKPGQPPRLLIYDVSTRATG | |
| | | IPARFSGGGSGTDFTLTISSLEPEDFAVYYCQQRSNWPPWTFGQGTKVEI | |
| | | K | |
| mesothelin | M19 | QVQLVQSGGGVVQPGRSLRLSCAASGFTFSSYGMHWVRQAPGKGLEWVAV | 65 |
| | (human) | ISYDGSNKYYADSVKGRFTISRDNSKNTLYLQMNSLRAEDTAVYYCAKGY | |
| | | SRYYYYGMDVWGQGTTVTVSSGGGGSGGGGSGGGGSGGGGSEIVMTQSPA | |
| | | TLSLSPGERAILSCRASQSVYTKYLGWYQQKPGQAPRLLIYDASTRATGI | |
| | | PDRFSGSGSGTDFTLTINRLEPEDFAVYYCQHYGGSPLITFGQGTKVDIK | |
| mesothelin | M20 | QVQLVQSGGGLVQPGGSLRLSCAASGFTFSSYAMSWVRQAPGKGLEWVSA | 66 |
| | (human) | ISGSGGSTYYADSVKGRFTISRDNSKNTLYLQMNSLRAEDTAVYYCAKRE | |
| | | AAAGHDWYFDLWGRGTLVTVSSGGGGSGGGGSGGGGSGGGGSDIRVTQSP | |
| | | SSLSASVGDRVTITCRASQSISSYLNWYQQKPGKAPKLLIYAASSLQSGV | |
| | | PSRFSGSGSGTDFTLTISSLQPEDFATYYCQQSYSIPLTFGQGTKVEIK | |
| mesothelin | M21 | QVQLVQSWAEVKKPGASVKVSCKASGYTFTSYYMHWVRQAPGQGLEWMGI | 67 |
| | (human) | INPSGGSTSYAQKFQGRVTMTRDTSTSTVYMELSNLRSEDTAVYYCARSP | |
| | | RVTTGYFDYWGQGTLVTVSSGGGGSGGGGSGGGGSGGGGSDIQLTQSPST | |
| | | LSASVGDRVTITCRASQSISSWLAWYQQKPGKAPKLLIYKASSLESGVPS | |
| | | RFSGSGSGTEFTLTISSLQPDDFATYYCQQYSSYPLTFGGGTRLEIK | |
| mesothelin | M22 | QVQLVQSGAEVRRPGASVKISCRASGDTSTRHYIHWLRQAPGQGPEWMGV | 68 |
| | (human) | INPTTGPATGSPAYAQMLQGRVTMTRDTSTRTVYMELRSLRFEDTAVYYC | |
| | | ARSVVGRSAPYYFDYWGQGTLVTVSSGGGGSGGGGSGGGGSGGGGSDIQM | |
| | | TQSPSSLSASVGDRVTITCRASQGISDYSAWYQQKPGKAPKLLIYAASTL | |
| | | QSGVPSRFSGSGSGTDFTLTISYLQSEDFATYYCQQYYSYPLTFGGGTKV | |
| | | DIK | |
| mesothelin | M23 | QVQLQQSGAEVKKPGASVKVSCKASGYTFTNYYMHWVRQAPGQGLEWMGI | 69 |
| | (human) | INPSGGYTTYAQKFQGRLTMTRDTSTSTVYMELSSLRSEDTAVYYCARIR | |
| | | SCGGDCYYFDNWGQGTLVTVSSGGGGSGGGGSGGGGSGGGGSDIQLTQSP | |
| | | STLSASVGDRVTITCRASENVNIWLAWYQQKPGKAPKLLIYKSSSLASGV | |
| | | PSRFSGSGSGAEFTLTISSLQPDDFATYYCQQYQSYPLTFGGGTKVDIK | |
| mesothelin | M24 | QITLKESGPALVKPTQTLTLTCTFSGFSLSTAGVHVGWIRQPPGKALEWL | 70 |
| | (human) | ALISWADDKRYRPSLRSRLDITRVTSKDQVVLSMTNMQPEDTATYYCALQ | |
| | | GFDGYEANWGPGTLVTVSSGGGGSGGGGSGGGGSGGGGSDIVMTQSPSSL | |
| | | SASAGDRVTITCRASRGISSALAWYQQKPGKPPKLLIYDASSLESGVPSR | |
| | | FSGSGSGTDFTLTIDSLEPEDFATYYCQQSYSTPWTFGQGTKVDIK | |

[0213] The sequences of the CDR sequences of the scFv domains of the mesothelin antigen binding domains provided in Table 2 are shown in Table 3 for the heavy chain variable domains and in Table 4 for the light chain variable domains.

TABLE 3
Amino acid sequences for the heavy chain (HC) CDR1, CDR2, and CDR3
regions of human anti-mesothelin scFvs

| | | SEQ | | SEQ | | SEQ |
|---|---|---|---|---|---|---|
| | | ID | | ID | | ID |
| Descrip. | HC-CDR1 | NO: | HC-CDR2 | NO: | HC-CDR3 | NO: |
| M5 | GYTFTDYYMH | 115 | WINPNSGGTNYAQKFQG | 134 | GWDFDY | 159 |
| M11 | GYTFTGYYMH | 121 | WINPNSGGTNYAQNFQG | 141 | GWDFDY | 165 |
| Ss1 | GYSFTGYTMN | 132 | LITPYNGASSYNQKFRG | 154 | GGYDGRGFDY | 179 |
| M1 | GYTFTGYYMH | 113 | RINPNSGGTNYAQKFQG | 133 | GRYYGMDV | 155 |
| M2 | GYTFTGYYMH | 113 | WINPNSGGTNYAQKFQG | 134 | DLRRTVVTPRAYYG | 156 |
| | | | | | MDV | |
| M3 | GYTFTGYYMH | 113 | WINPNSGGTNYAQKFQG | 134 | GEWDGSYYYDY | 157 |
| M4 | GFTFSSYWMH | 114 | RINTDGSTTTYADSVEG | 135 | GHWAV | 158 |
| M6 | GYTFTSYYMH | 116 | IINPSGGSTSYAQKFQ | 136 | YRLIAVAGDYYYYG | 160 |
| | | | | | MDV | |
| M7 | GFTFSSYAMH | 117 | VISYDGSNKYYADSVKG | 137 | WKVSSSSPAFDY | 161 |
| M8 | GYPFTGYSLH | 118 | WINPNSGGTNYAQKFQG | 138 | DHYGGNSLFY | 162 |
| M9 | GYTFTSYYMH | 119 | IINPSGGSTGYAQKFQG | 139 | GGYSSSSDAFDI | 163 |
| M10 | GYTFTSYGIS | 120 | WISAYNGNTNYAQKLQ | 140 | VAGGIYYYYGMDV | 164 |
| M12 | GYTFTGYYMH | 121 | RINPNSGGTNYAQKFQG | 142 | TTTSYAFDI | 166 |
| M13 | GFIFSDYYMG | 122 | YIGRSGSSMYYADSVKG | 143 | SPVVAATEDFQH | 167 |
| M14 | GFTFRGYYIH | 123 | IINPSGGSRAYAQKFQG | 144 | TASCGGDCYYLDY | 168 |
| M15 | GFTFDDYAMH | 124 | GISWNSGSIGYADSVK | 145 | DGSSSWSWGYFDY | 169 |
| M16 | GFTFDDYAMH | 124 | GISWNSGSTGYADSVKG | 146 | DSSSWYGGGSAFDI | 170 |
| M17 | GFTFDDYAMH | 124 | GISWNSGSTGYADSVKG | 146 | DSSSWYGGGSAFDI | 171 |
| M18 | GFTFSSYWMH | 125 | RINSDGSSTSYADSVKG | 147 | TGWVGSYYYYMDV | 172 |
| M19 | GFTFSSYGMH | 126 | VISYDGSNKYYADSVKG | 148 | GYSRYYYYGMDV | 173 |
| M20 | GFTFSSYAMS | 127 | AISGSGGSTYYADSVKG | 149 | REAAAGHDWYFDL | 174 |
| M21 | GYTFTSYYMH | 128 | IINPSGGSTSYAQKFQG | 150 | SPRVTTGYFDY | 175 |
| M22 | GDTSTRHYIH | 129 | VINPTTGPATGSPAYAQMLQG | 151 | SVVGRSAPYYFDY | 176 |
| M23 | GYTFTNYYMH | 130 | IINPSGGYTTYAQKFQG | 152 | IRSCGGDCYYFDN | 177 |
| M24 | GFSLSTAGVHVG | 131 | LISWADDKRYRPSLRS | 153 | QGFDGYEAN | 178 |

TABLE 4
Amino acid sequences for the light chain (LC) CDR1, CDR2,
and CDR3 regions of human anti-mesothelin scFvs

| | | | | SEQ | | SEQ |
|---|---|---|---|---|---|---|
| | | SEQ ID | | ID | | ID |
| Description | LC-CDR1 | NO: | LC-CDR2 | NO: | LC-CDR3 | NO: |
| M5 | RASQSIRYYLS | 184 | TASILQN | 209 | LQTYTTPD | 234 |
| M11 | RASQSIRYYLS | 190 | TASILQN | 215 | LQTYTTPD | 240 |
| Ss1 | SASSSVSYMH | 204 | DTSKLAS | 229 | QQWSGYPLT | 254 |
| M1 | RASQSVSSNFA | 180 | DASNRAT | 205 | HQRSNWLYT | 230 |
| M2 | QASQDISNSLN | 181 | DASTLET | 206 | QQHDNLPLT | 231 |
| M3 | RASQSINTYLN | 182 | AASSLQS | 207 | QQSFSPLT | 232 |
| M4 | RASQSISDRLA | 183 | KASSLES | 208 | QQYGHLPMYT | 233 |
| M6 | RASQGVGRWLA | 185 | AASTLQS | 210 | QQANSFPLT | 235 |
| M7 | RASQSVYTKYLG | 186 | DASTRAT | 211 | QHYGGSPLIT | 236 |
| M8 | RASQDSGTWLA | 187 | DASTLED | 212 | QQYNSYPLT | 237 |
| M9 | RASQDISSALA | 188 | DASSLES | 213 | QQFSSYPLT | 238 |
| M10 | KSSHSVLYNRNNKNYLA | 189 | WASTRKS | 214 | QQTQTFPLT | 239 |
| M12 | RASQSISTWLA | 191 | KASTLES | 216 | QQYNTYSPYT | 241 |
| M13 | RASQSVTSNYLA | 192 | GASTRAT | 217 | QQYGSAPVT | 242 |
| M14 | RASENVNIWLA | 193 | KSSSLAS | 218 | QQYQSYPLT | 243 |
| M15 | QGDALRSYYAS | 194 | GKNNRPS | 219 | NSRDSSGYPV | 244 |
| M16 | QGDSLRSYYAS | 195 | GRSRRPS | 220 | NSRDNTANHYV | 245 |
| M17 | QGDSLRSYYAS | 196 | GKNNRPS | 221 | NSRGSSGNHYV | 246 |
| M18 | RASQSVSSNYLA | 197 | DVSTRAT | 222 | QQRSNWPPWT | 247 |
| M19 | RASQSVYTKYLG | 198 | DASTRAT | 223 | QHYGGSPLIT | 248 |
| M20 | RASQSISSYLN | 199 | AASSLQS | 224 | QQSYSIPLT | 249 |
| M21 | RASQSISSWLA | 200 | KASSLES | 225 | QQYSSYPLT | 250 |
| M22 | RASQGISDYS | 201 | AASTLQS | 226 | QQYYSYPLT | 251 |
| M23 | RASENVNIWLA | 202 | KSSSLAS | 227 | QQYQSYPLT | 252 |
| M24 | RASRGISSALA | 203 | DASSLES | 228 | QQSYSTPWT | 253 |

[0214] Any known anti-mesothelian binding domain, from, for example, a known antibody, bispecific molecule or CAR, may be suitable for use in the CAR of the present invention. For example, the antigen binding domain against mesothelin is or may be derived from an antigen binding, e.g., CDRs or VH and VL, of an antibody, antigen-binding fragment or CAR described in, e.g., PCT publication WO2015/090230. In embodiments, the antigen binding domain against mesothelin is or is derived from an antigen binding portion, e.g., CDRs or VH and VL, of an antibody, antigen-binding fragment, or CAR described in, e.g., PCT publication WO1997/025068, WO1999/028471, WO2005/014652, WO2006/099141, WO2009/045957, WO2009/068204, WO2013/142034, WO2013/040557, or WO2013/063419.

[0215] In one embodiment, the mesothelin binding domain comprises one or more (e.g., all three) light chain complementary determining region 1 (LC CDR1), light chain complementary determining region 2 (LC CDR2), and light chain complementary determining region 3 (LC CDR3) of a mesothelin binding domain described herein, e.g., provided in Table 2 or 4, and/or one or more (e.g., all three) heavy chain complementary determining region 1 (HC CDR1), heavy chain complementary determining region 2 (HC CDR2), and heavy chain complementary determining region 3 (HC CDR3) of a mesothelin binding domain described herein, e.g., provided in Table 2 or 3. In one embodiment, the mesothelin binding domain comprises one, two, or all of LC CDR1, LC CDR2, and LC CDR3 of any amino acid sequences as provided in Table 4; and one, two or three of all of HC CDR1, HC CDR2 and HC CDR3, of any amino acid acid sequences as provided in Table 3.

[0216] In one embodiment, the mesothelin antigen binding domain comprises:
[0217] (i) (a) a LC CDR1 amino acid sequence of SEQ ID NO: 184, a LC CDR2 amino acid sequence of SEQ ID NO: 209, and a LC CDR3 amino acid sequence of SEQ ID NO: 234; and
   [0218] (b) a HC CDR1 amino acid sequence of SEQ ID NO: 115, a HC CDR2 amino acid sequence of SEQ ID NO: 134, and a HC CDR3 amino acid sequence of SEQ ID NO: 159;
[0219] (ii) (a) a LC CDR1 amino acid sequence of SEQ ID NO: 190, a LC CDR2 amino acid sequence of SEQ ID NO: 215, and a LC CDR3 amino acid sequence of SEQ ID NO: 240; and
   [0220] (b) a HC CDR1 amino acid sequence of SEQ ID NO: 121, a HC CDR2 amino acid sequence of SEQ ID NO: 141, and a HC CDR3 amino acid sequence of SEQ ID NO: 165;
[0221] (iii) (a) a LC CDR1 amino acid sequence of SEQ ID NO: 204, a LC CDR2 amino acid sequence of SEQ ID NO: 229, and a LC CDR3 amino acid sequence of SEQ ID NO: 254; and
   [0222] (b) a HC CDR1 amino acid sequence of SEQ ID NO: 132, a HC CDR2 amino acid sequence of SEQ ID NO: 154, and a HC CDR3 amino acid sequence of SEQ ID NO: 179;
[0223] (iv) (a) a LC CDR1 amino acid sequence of SEQ ID NO: 180, a LC CDR2 amino acid sequence of SEQ ID NO: 205, and a LC CDR3 amino acid sequence of SEQ ID NO: 230; and
   [0224] (b) a HC CDR1 amino acid sequence of SEQ ID NO: 113, a HC CDR2 amino acid sequence of SEQ ID NO: 133, and a HC CDR3 amino acid sequence of SEQ ID NO: 155;
[0225] (v) (a) a LC CDR1 amino acid sequence of SEQ ID NO: 181, a LC CDR2 amino acid sequence of SEQ ID NO: 206, and a LC CDR3 amino acid sequence of SEQ ID NO: 231; and
   [0226] (b) a HC CDR1 amino acid sequence of SEQ ID NO: 113, a HC CDR2 amino acid sequence of SEQ ID NO: 134, and a HC CDR3 amino acid sequence of SEQ ID NO: 156;
[0227] (vi) (a) a LC CDR1 amino acid sequence of SEQ ID NO: 182, a LC CDR2 amino acid sequence of SEQ ID NO: 207, and a LC CDR3 amino acid sequence of SEQ ID NO: 232; and
   [0228] (b) a HC CDR1 amino acid sequence of SEQ ID NO: 113, a HC CDR2 amino acid sequence of SEQ ID NO: 134, and a HC CDR3 amino acid sequence of SEQ ID NO: 157;
[0229] (vii) (a) a LC CDR1 amino acid sequence of SEQ ID NO: 183, a LC CDR2 amino acid sequence of SEQ ID NO: 208, and a LC CDR3 amino acid sequence of SEQ ID NO: 233; and
   [0230] (b) a HC CDR1 amino acid sequence of SEQ ID NO: 114, a HC CDR2 amino acid sequence of SEQ ID NO: 135, and a HC CDR3 amino acid sequence of SEQ ID NO: 158;
[0231] (viii) (a) a LC CDR1 amino acid sequence of SEQ ID NO: 186, a LC CDR2 amino acid sequence of SEQ ID NO: 210, and a LC CDR3 amino acid sequence of SEQ ID NO: 235; and
   [0232] (b) a HC CDR1 amino acid sequence of SEQ ID NO: 116, a HC CDR2 amino acid sequence of SEQ ID NO: 136, and a HC CDR3 amino acid sequence of SEQ ID NO: 160;
[0233] (ix) (a) a LC CDR1 amino acid sequence of SEQ ID NO: 186, a LC CDR2 amino acid sequence of SEQ ID NO: 211, and a LC CDR3 amino acid sequence of SEQ ID NO: 236; and
   [0234] (b) a HC CDR1 amino acid sequence of SEQ ID NO: 117, a HC CDR2 amino acid sequence of SEQ ID NO: 137, and a HC CDR3 amino acid sequence of SEQ ID NO: 161;
[0235] (x) (a) a LC CDR1 amino acid sequence of SEQ ID NO: 187, a LC CDR2 amino acid sequence of SEQ ID NO: 212, and a LC CDR3 amino acid sequence of SEQ ID NO: 237; and
   [0236] (b) a HC CDR1 amino acid sequence of SEQ ID NO: 118, a HC CDR2 amino acid sequence of SEQ ID NO: 138, and a HC CDR3 amino acid sequence of SEQ ID NO: 162;
[0237] (xi) (a) a LC CDR1 amino acid sequence of SEQ ID NO: 188, a LC CDR2 amino acid sequence of SEQ ID NO: 213, and a LC CDR3 amino acid sequence of SEQ ID NO: 238; and
   [0238] (b) a HC CDR1 amino acid sequence of SEQ ID NO: 119, a HC CDR2 amino acid sequence of SEQ ID NO: 139, and a HC CDR3 amino acid sequence of SEQ ID NO: 163;
[0239] (xii) (a) a LC CDR1 amino acid sequence of SEQ ID NO: 189, a LC CDR2 amino acid sequence of SEQ ID NO: 214, and a LC CDR3 amino acid sequence of SEQ ID NO: 239; and
   [0240] (b) a HC CDR1 amino acid sequence of SEQ ID NO: 120, a HC CDR2 amino acid sequence of SEQ ID NO: 140, and a HC CDR3 amino acid sequence of SEQ ID NO: 164;
[0241] (xiii) (a) a LC CDR1 amino acid sequence of SEQ ID NO: 191, a LC CDR2 amino acid sequence of SEQ ID NO: 216, and a LC CDR3 amino acid sequence of SEQ ID NO: 241; and
   [0242] (b) a HC CDR1 amino acid sequence of SEQ ID NO: 121, a HC CDR2 amino acid sequence of SEQ ID NO: 142, and a HC CDR3 amino acid sequence of SEQ ID NO: 166;
[0243] (xiv) (a) a LC CDR1 amino acid sequence of SEQ ID NO: 192, a LC CDR2 amino acid sequence of SEQ ID NO: 217, and a LC CDR3 amino acid sequence of SEQ ID NO: 242; and
   [0244] (b) a HC CDR1 amino acid sequence of SEQ ID NO: 122, a HC CDR2 amino acid sequence of SEQ ID NO: 143, and a HC CDR3 amino acid sequence of SEQ ID NO: 167;
[0245] (xv) (a) a LC CDR1 amino acid sequence of SEQ ID NO: 193, a LC CDR2 amino acid sequence of SEQ ID NO: 218, and a LC CDR3 amino acid sequence of SEQ ID NO: 243; and
   [0246] (b) a HC CDR1 amino acid sequence of SEQ ID NO: 123, a HC CDR2 amino acid sequence of SEQ ID NO: 144, and a HC CDR3 amino acid sequence of SEQ ID NO: 168;
[0247] (xvi) (a) a LC CDR1 amino acid sequence of SEQ ID NO: 194, a LC CDR2 amino acid sequence of SEQ ID NO: 219, and a LC CDR3 amino acid sequence of SEQ ID NO: 244; and
   [0248] (b) a HC CDR1 amino acid sequence of SEQ ID NO: 124, a HC CDR2 amino acid sequence of SEQ ID NO: 145, and a HC CDR3 amino acid sequence of SEQ ID NO: 169;
[0249] (xvii) (a) a LC CDR1 amino acid sequence of SEQ ID NO: 195, a LC CDR2 amino acid sequence of SEQ ID NO: 220, and a LC CDR3 amino acid sequence of SEQ ID NO: 245; and
   [0250] (b) a HC CDR1 amino acid sequence of SEQ ID NO: 124, a HC CDR2 amino acid sequence of SEQ ID NO: 146, and a HC CDR3 amino acid sequence of SEQ ID NO: 170;
[0251] (xviii) (a) a LC CDR1 amino acid sequence of SEQ ID NO: 196, a LC CDR2 amino acid sequence of SEQ ID NO: 221, and a LC CDR3 amino acid sequence of SEQ ID NO: 246; and
   [0252] (b) a HC CDR1 amino acid sequence of SEQ ID NO: 124, a HC CDR2 amino acid sequence of SEQ ID NO: 146, and a HC CDR3 amino acid sequence of SEQ ID NO: 171;
[0253] (xix) (a) a LC CDR1 amino acid sequence of SEQ ID NO: 197, a LC CDR2 amino acid sequence of SEQ ID NO: 222, and a LC CDR3 amino acid sequence of SEQ ID NO: 247; and
   [0254] (b) a HC CDR1 amino acid sequence of SEQ ID NO: 125, a HC CDR2 amino acid sequence of SEQ ID NO: 147, and a HC CDR3 amino acid sequence of SEQ ID NO: 172;
[0255] (xx) (a) a LC CDR1 amino acid sequence of SEQ ID NO: 198, a LC CDR2 amino acid sequence of SEQ ID NO: 223, and a LC CDR3 amino acid sequence of SEQ ID NO: 248; and
   [0256] (b) a HC CDR1 amino acid sequence of SEQ ID NO: 126, a HC CDR2 amino acid sequence of SEQ ID NO: 148, and a HC CDR3 amino acid sequence of SEQ ID NO: 173;
[0257] (xxi) (a) a LC CDR1 amino acid sequence of SEQ ID NO: 199, a LC CDR2 amino acid sequence of SEQ ID NO: 224, and a LC CDR3 amino acid sequence of SEQ ID NO: 249; and
   [0258] (b) a HC CDR1 amino acid sequence of SEQ ID NO: 127, a HC CDR2 amino acid sequence of SEQ ID NO: 149, and a HC CDR3 amino acid sequence of SEQ ID NO: 174;
[0259] (xxii) (a) a LC CDR1 amino acid sequence of SEQ ID NO: 200, a LC CDR2 amino acid sequence of SEQ ID NO: 225, and a LC CDR3 amino acid sequence of SEQ ID NO: 250; and
   [0260] (b) a HC CDR1 amino acid sequence of SEQ ID NO: 128, a HC CDR2 amino acid sequence of SEQ ID NO: 150, and a HC CDR3 amino acid sequence of SEQ ID NO: 175;
[0261] (xxiii) (a) a LC CDR1 amino acid sequence of SEQ ID NO: 201, a LC CDR2 amino acid sequence of SEQ ID NO: 226, and a LC CDR3 amino acid sequence of SEQ ID NO: 251; and
   [0262] (b) a HC CDR1 amino acid sequence of SEQ ID NO: 129, a HC CDR2 amino acid sequence of SEQ ID NO: 151, and a HC CDR3 amino acid sequence of SEQ ID NO: 176;
[0263] (xxiv) (a) a LC CDR1 amino acid sequence of SEQ ID NO: 202, a LC CDR2 amino acid sequence of SEQ ID NO: 227, and a LC CDR3 amino acid sequence of SEQ ID NO: 252; and
   [0264] (b) a HC CDR1 amino acid sequence of SEQ ID NO: 130, a HC CDR2 amino acid sequence of SEQ ID NO: 152, and a HC CDR3 amino acid sequence of SEQ ID NO: 177; or
[0265] (xxv) (a) a LC CDR1 amino acid sequence of SEQ ID NO: 203, a LC CDR2 amino acid sequence of SEQ ID NO: 228, and a LC CDR3 amino acid sequence of SEQ ID NO: 253; and
   [0266] (b) a HC CDR1 amino acid sequence of SEQ ID NO: 131, a HC CDR2 amino acid sequence of SEQ ID NO: 153, and a HC CDR3 amino acid sequence of SEQ ID NO: 178.

[0267] In one embodiment, the mesothelin binding domain comprises a light chain variable region described herein (e.g., in Table 2) and/or a heavy chain variable region described herein (e.g., in Table 2). In one embodiment, the mesothelin binding domain is a scFv comprising a light chain and a heavy chain of an amino acid sequence listed in Table 2. In an embodiment, the mesothelin binding domain (e.g., an scFv) comprises: a light chain variable region comprising an amino acid sequence having at least one, two or three modifications (e.g., substitutions, e.g., conservative substitutions) but not more than 30, 20 or 10 modifications (e.g., substitutions, e.g., conservative substitutions) of an amino acid sequence of a light chain variable region provided in Table 2, or a sequence with 95-99% identity with an amino acid sequence provided in Table 2; and/or a heavy chain variable region comprising an amino acid sequence having at least one, two or three modifications (e.g., substitutions, e.g., conservative substitutions) but not more than 30, 20 or 10 modifications (e.g., substitutions, e.g., conservative substitutions) of an amino acid sequence of a heavy chain variable region provided in Table 2, or a sequence with 95-99% identity to an amino acid sequence provided in Table 2.

[0268] In one embodiment, the mesothelin binding domain comprises an amino acid sequence selected from a group consisting of SEQ ID NO: 46; SEQ ID NO: 47; SEQ ID NO: 48; SEQ ID NO: 49; SEQ ID NO: 50; SEQ ID NO: 51; SEQ ID NO: 52; SEQ ID NO: 53; SEQ ID NO: 54; SEQ ID NO: 55; SEQ ID NO: 56; SEQ ID NO: 57; SEQ ID NO: 58; SEQ ID NO: 59; SEQ ID NO: 60; SEQ ID NO: 61; SEQ ID NO: 62; SEQ ID NO: 63; SEQ ID NO: 64; SEQ ID NO: 65; SEQ ID NO: 66; SEQ ID NO: 67, SEQ ID NO: 68; SEQ ID NO: 69; and SEQ ID NO: 70; or an amino acid sequence having at least one, two or three modifications (e.g., substitutions, e.g., conservative substitutions) but not more than 30, 20 or 10 modifications (e.g., substitutions, e.g., conservative substitutions) to any of the aforesaid sequences; or a sequence with 95-99% identity to any of the aforesaid sequences. In one embodiment, the mesothelin binding domain is a scFv, and a light chain variable region comprising an amino acid sequence described herein, e.g., in Table 2, is attached to a heavy chain variable region comprising an amino acid sequence described herein, e.g., in Table 2, via a linker, e.g., a linker described herein. In one embodiment, the mesothelin binding domain includes a (Gly₄-Ser)ₙ linker, wherein n is 1, 2, 3, 4, 5, or 6, preferably 4 (SEQ ID NO: 80). The light chain variable region and heavy chain variable region of a scFv can be, e.g., in any of the following orientations: light chain variable region-linker-heavy chain variable region or heavy chain variable region-linker-light chain variable region.

[0269] Such antigen binding domains which bind mesothelin, e.g., as described herein, are useful, for example, in embodiments of the invention in which a disease associated with the expression of mesothelin, e.g., as described herein, is treated.

[0270] In an embodiment, the antigen binding domain of a CAR, e.g., a CAR expressed by a cell of the invention, binds to human EGFRvIII. In an embodiment, the antigen binding domain is a murine scFv domain that binds to human EGFRvIII such as, e.g., mu310C. In an embodiment, the antigen binding domain is a humanized antibody or antibody fragment, e.g., scFv domain, derived from the murine mu310C scFv. Exemplary humanized scFv domains (and their sequences) that bind to EGFRvIII are provided in Table 5.

[0271] In an embodiment, the antigen binding domain of a CAR, e.g., a CAR expressed by a cell of the inveniton, binds to human claudin 6 (CLDN6). In an embodiment, the antigen binding domain is a murine scFv domain that binds to human CLDN6. In an embodiment, the antigen binding domain is a humanized antibody or antibody fragment. Exemplary scFv domains (and their sequences) that bind to CLDN6 are provided in Table 5. The scFv domain sequences provided in Table 5 include a light chain variable region (VL) and a heavy chain variable region (VH). The VL and VH are attached by a linker comprising the sequence GGGGSGGGGSGGGGSGGGGS (SEQ ID NO: 29), e.g., in the following orientation: VL-linker-VH.

TABLE 5
Examples of antigen binding domains that bind to the tumor
antigen EGFRvIII or CLDN6 (as indicated)

| Tumor | | | SEQ ID |
|---|---|---|---|
| antigen | Name | Amino acid sequence | NO: |
| EGFR | huscFv1 | Eiqlvqsgaevkkpgatvkisckgsgfniedyyihwvqqapgkglewmgridpendetkygpif | 71 |
| vIII | | qgrvtitadtstntvymelsslrsedtavyycafrggvywgqgttvtvssggggsggggsggggsgg | |
| | | ggsdvvmtqspdslavslgeratinckssqslldsdgktylnwlqqkpgqppkrlislvskldsgvp | |
| | | drfsgsgsgtdftltisslqaedvavyycwqgthfpgtfgggtkveik | |
| EGFR | huscFv2 | Dvvmtqspdslavslgeratinckssqslldsdgktylnwlqqkpgqppkrlislvskldsgvpdrfs | 72 |
| vIII | | gsgsgtdftltisslqaedvavyycwqgthfpgtfgggtkveikggggsggggsggggsggggsei | |
| | | qlvqsgaevkkpgatvkisckgsgfniedyyihwvqqapgkglewmgridpendetkygpifqg | |
| | | rvtitadtstntvymelsslrsedtavyycafrggvywgqgttvtvss | |
| EGFR | huscFv3 | Eiqlvqsgaevkkpgeslrisckgsgfniedyyihwvrqmpgkglewmgridpendetkygpif | 73 |
| vIII | | qghvtisadtsintvylqwsslkasdtamyycafrggvywgqgttvtvssggggsggggsggggs | |
| | | ggggsdvvmtqsplslpvtlgqpasisckssqslldsdgktylnwlqqrpgqsprrlislvskldsgv | |
| | | pdrfsgsgsgtdftlkisrveaedvgvyycwqgthfpgtfgggtkveik | |
| EGFR | huscFv4 | Dvvmtqsplslpvtlgqpasisckssqslldsdgktylnwlqqrpgqsprrlislvskldsgvpdrfsg | 74 |
| vIII | | sgsgtdftlkisrveaedvgvyycwqgthfpgtfgggtkveikggggsggggsggggsggggseiq | |
| | | lvqsgaevkkpgeslrisckgsgfniedyyihwvrqmpgkglewmgridpendetkygpifqgh | |
| | | vtisadtsintvylqwsslkasdtamyycafrggvywgqgttvtvss | |
| EGFR | huscFv5 | Eiqlvqsgaevkkpgatvkisckgsgfniedyyihwvqqapgkglewmgridpendetkygpif | 75 |
| vIII | | qgrvtitadtstntvymelsslrsedtavyycafrggvywgqgttvtvssggggsggggsggggsgg | |
| | | ggsdvvmtqsplslpvtlgqpasisckssqslldsdgktylnwlqqrpgqsprrlislvskldsgvpdr | |
| | | fsgsgsgtdftlkisrveaedvgvyycwqgthfpgtfgggtkveik | |
| EGFR | huscFv6 | Eiqlvqsgaevkkpgeslrisckgsgfniedyyihwvrqmpgkglewmgridpendetkygpif | 76 |
| vIII | | qghvtisadtsintvylqwsslkasdtamyycafrggvywgqgttvtvssggggsggggsggggs | |
| | | ggggsdvvmtqspdslavslgeratinckssqslldsdgktylnwlqqkpgqppkrlislvskldsg | |
| | | vpdrfsgsgsgtdftltisslqaedvavyycwqgthfpgtfgggtkveik | |
| EGFR | huscFv7 | Dvvmtqspdslavslgeratinckssqslldsdgktylnwlqqkpgqppkrlislvskldsgvpdrfs | 77 |
| vIII | | gsgsgtdftltisslqaedvavyycwqgthfpgtfgggtkveikggggsggggsggggsggggsei | |
| | | qlvqsgaevkkpgeslrisckgsgfniedyyihwvrqmpgkglewmgridpendetkygpifqg | |
| | | hvtisadtsintvylqwsslkasdtamyycafrggvywgqgttvtvss | |
| EGFR | huscFv8 | Dvvmtqsplslpvtlgqpasisckssqslldsdgktylnwlqqrpgqsprrlislvskldsgvpdrfsg | 78 |
| vIII | | sgsgtdftlkisrveaedvgvyycwqgthfpgtfgggtkveikggggsggggsggggsggggseiq | |
| | | lvqsgaevkkpgatvkisckgsgfniedyyihwvqqapgkglewmgridpendetkygpifqgr | |
| | | vtitadtstntvymelsslrsedtavyycafrggvywgqgttvtvss | |
| EGFR | Mu310C | eiqlqqsgaelvkpgasvklsctgsgfniedyyihwvkqrteqglewigridpendetkygpifqgr | 79 |
| vIII | | atitadtssntvylqlssltsedtavyycafrggvywgpgttltvssggggsggggsggggshmdvv | |
| | | mtqspltlsvaigqsasisckssqslldsdgktylnwllqrpgqspkrlislvskldsgvpdrftgsgsgt | |
| | | dftlrisrveaedlgiyycwqgthfpgtfgggtkleik | |
| Claudin6 | muMAB | EVQLQQSGPELVKPGASMKISCKASGYSFTGYTMNWVKQSHGK | 98 |
| 64A | | NLEWIGLINPYNGGTIYNQKFKGKATLTVDKSSSTAYMELLSLTS | |
| | | EDSAVYYCARDYGFVLDYWGQGTTLTVSSGGGGSGGGGSGGGG | |
| | | SGGGGSQIVLTQSPSIMSVSPGEKVTITCSASSSVSYMHWFQQKPG | |
| | | TSPKLCIYSTSNLASGVPARFSGRGSGTSYSLTISRVAAEDAATYY | |
| | | CQQRSNYPPWTFGGGTKLEIK | |
| Claudin6 | mAb206- | EVQLQQSGPELVKPGASMKISCKASGYSFTGYTMNWVKQSHGK | 99 |
| | LCC | NLEWIGLINPYNGGTIYNQKFKGKATLTVDKSSSTAYMELLSLTS | |
| | | EDSAVYYCARDYGFVLDYWGQGTTLTVSSGGGGSGGGGSGGGG | |
| | | SGGGGSQIVLTQSPAIMSASPGEKVTITCSASSSVSYLHWFQQKPG | |
| | | TSPKLWVYSTSNLPSGVPARFGGSGSGTSYSLTISRMEAEDAATY | |
| | | YCQQRSIYPPWTFGGGTKLEIK | |
| Claudin6 | mAb206- | EVQLQQSGPELVKPGASMKISCKASGYSFTGYTMNWVKQSHGK | 100 |
| | SUBG | NLEWIGLINPYNGGTIYNQKFKGKATLTVDKSSSTAYMELLSLTS | |
| | | EDSAVYYCARDYGFVLDYWGQGTTLTVSSGGGGSGGGGSGGGG | |
| | | SGGGGSQIVLTQSPSIMSVSPGEKVTITCSASSSVSYMHWFQQKPG | |
| | | TSPKLGIYSTSNLASGVPARFSGRGSGTSYSLTISRVAAEDAATYY | |
| | | CQQRSNYPPWTFGGGTKLEIK | |

[0272] In one embodiment, the EGFRvIII binding domain comprises one or more (e.g., all three) light chain complementary determining region 1 (LC CDR1), light chain complementary determining region 2 (LC CDR2), and light chain complementary determining region 3 (LC CDR3) of an EGFRvIII binding domain described herein, e.g., provided in Table 5, and/or one or more (e.g., all three) heavy chain complementary determining region 1 (HC CDR1), heavy chain complementary determining region 2 (HC CDR2), and heavy chain complementary determining region 3 (HC CDR3) of an EGFRvIII binding domain described herein, e.g., provided in Table 5.

[0273] In one embodiment, the EGFRvIII binding domain comprises a light chain variable region described herein (e.g., in Table 5) and/or a heavy chain variable region described herein (e.g., in Table 5). In one embodiment, the EGFRvIII binding domain is a scFv comprising a light chain and a heavy chain of an amino acid sequence listed in Table 5. In an embodiment, the EGFRvIII binding domain (e.g., an scFv) comprises: a light chain variable region comprising an amino acid sequence having at least one, two or three modifications (e.g., substitutions, e.g., conservative substitutions) but not more than 30, 20 or 10 modifications (e.g., substitutions, e.g., conservative substitutions) of an amino acid sequence of a light chain variable region provided in Table 5, or a sequence with 95-99% identity with an amino acid sequence provided in Table 5; and/or a heavy chain variable region comprising an amino acid sequence having at least one, two or three modifications (e.g., substitutions, e.g., conservative substitutions) but not more than 30, 20 or 10 modifications (e.g., substitutions, e.g., conservative substitutions) of an amino acid sequence of a heavy chain variable region provided in Table 5, or a sequence with 95-99% identity to an amino acid sequence provided in Table 5.

[0274] In one embodiment, the EGFRvIII binding domain comprises an amino acid sequence selected from a group consisting of SEQ ID NO: 71; SEQ ID NO: 72; SEQ ID NO: 73; SEQ ID NO: 74; SEQ ID NO: 75; SEQ ID NO: 76; SEQ ID NO: 77; SEQ ID NO: 78; and SEQ ID NO: 79; or an amino acid sequence having at least one, two or three modifications (e.g., substitutions, e.g., conservative substitutions) but not more than 30, 20 or 10 modifications (e.g., substitutions, e.g., conservative substitutions) to any of the aforesaid sequences; or a sequence with 95-99% identity to any of the aforesaid sequences. In one embodiment, the EGFRvIII binding domain is a scFv, and a light chain variable region comprising an amino acid sequence described herein, e.g., in Table 5, is attached to a heavy chain variable region comprising an amino acid sequence described herein, e.g., in Table 5, via a linker, e.g., a linker described herein. In one embodiment, the EGFRvIII binding domain includes a (Gly₄-Ser)n linker, wherein n is 1, 2, 3, 4, 5, or 6, preferably 4 (SEQ ID NO: 80). The light chain variable region and heavy chain variable region of a scFv can be, e.g., in any of the following orientations: light chain variable region-linker-heavy chain variable region or heavy chain variable region-linker-light chain variable region.

[0275] In one embodiment, the claudin-6 binding domain comprises one or more (e.g., all three) light chain complementary determining region 1 (LC CDR1), light chain complementary determining region 2 (LC CDR2), and light chain complementary determining region 3 (LC CDR3) of an EGFRvIII binding domain described herein, e.g., provided in Table 5, and/or one or more (e.g., all three) heavy chain complementary determining region 1 (HC CDR1), heavy chain complementary determining region 2 (HC CDR2), and heavy chain complementary determining region 3 (HC CDR3) of an claudin-6 binding domain described herein, e.g., provided in Table 5.

[0276] In one embodiment, the claudin-6 binding domain comprises a light chain variable region described herein (e.g., in Table 5) and/or a heavy chain variable region described herein (e.g., in Table 5). In one embodiment, the claudin-6 binding domain is a scFv comprising a light chain and a heavy chain of an amino acid sequence listed in Table 5. In an embodiment, the claudin-6 binding domain (e.g., an scFv) comprises: a light chain variable region comprising an amino acid sequence having at least one, two or three modifications (e.g., substitutions, e.g., conservative substitutions) but not more than 30, 20 or 10 modifications (e.g., substitutions, e.g., conservative substitutions) of an amino acid sequence of a light chain variable region provided in Table 5, or a sequence with 95-99% identity with an amino acid sequence provided in Table 5; and/or a heavy chain variable region comprising an amino acid sequence having at least one, two or three modifications (e.g., substitutions, e.g., conservative substitutions) but not more than 30, 20 or 10 modifications (e.g., substitutions, e.g., conservative substitutions) of an amino acid sequence of a heavy chain variable region provided in Table 5, or a sequence with 95-99% identity to an amino acid sequence provided in Table 5.

[0277] Such antigen binding domains which bind EGFRvIII, e.g., as described herein, are useful, for example, in embodiments of the invention in which a disease associated with the expression of EGFRvIII, e.g., as described herein, is treated.

[0278] In one embodiment, the claudin-6 binding domain comprises an amino acid sequence selected from a group consisting of SEQ ID NO: 98; SEQ ID NO: 99; and SEQ ID NO: 100; or an amino acid sequence having at least one, two or three modifications (e.g., substitutions, e.g., conservative substitutions) but not more than 30, 20 or 10 modifications (e.g., substitutions, e.g., conservative substitutions) to any of the aforesaid sequences; or a sequence with 95-99% identity to any of the aforesaid sequences. In one embodiment, the claudin-6 binding domain is a scFv, and a light chain variable region comprising an amino acid sequence described herein, e.g., in Table 5, is attached to a heavy chain variable region comprising an amino acid sequence described herein, e.g., in Table 5, via a linker, e.g., a linker described herein. In one embodiment, the claudin-6 binding domain includes a (Gly₄-Ser)ₙ linker, wherein n is 1, 2, 3, 4, 5, or 6, preferably 4 (SEQ ID NO: 80). The light chain variable region and heavy chain variable region of a scFv can be, e.g., in any of the following orientations: light chain variable region-linker-heavy chain variable region or heavy chain variable region-linker-light chain variable region.

[0279] In one embodiment, an antigen binding domain against GD2 is an antigen binding portion, e.g., CDRs, of an antibody described in, e.g., Mujoo et al., Cancer Res. 47(4):1098-1104 (1987); Cheung et al., Cancer Res 45(6):2642-2649 (1985), Cheung et al., J Clin Oncol 5(9):1430-1440 (1987), Cheung et al., J Clin Oncol 16(9):3053-3060 (1998), Handgretinger et al., Cancer Immunol Immunother 35(3):199-204 (1992). In some embodiments, an antigen binding domain against GD2 is an antigen binding portion of an antibody selected from mAb 14.18, 14G2a, ch14.18, hu14.18, 3F8, hu3F8, 3G6, 8B6, 60C3, 10B8, ME36.1, and 8H9, see e.g., WO2012033885, WO2013040371, WO2013192294, WO2013061273, WO2013123061, WO2013074916, and WO201385552. In some embodiments, an antigen binding domain against GD2 is an antigen binding portion of an antibody described in US Publication No.: 20100150910 or PCT Publication No.: WO 2011160119.

[0280] In one embodiment, an antigen binding domain against the Tn antigen, the sTn antigen, a Tn-O-glycopeptide antigen, or a sTn-O-glycopeptide antigen is an antigen binding portion, e.g., CDRs, of an antibody described in, e.g., US 2014/0178365, U.S. Pat. No. 8,440,798, EP 2083868 A2, Brooks et al., PNAS 107(22):10056-10061 (2010), and Stone et al., OncoImmunology 1(6):863-873(2012).

[0281] In one embodiment, an antigen binding domain against PSMA is an antigen binding portion, e.g., CDRs, of an antibody described in, e.g., Parker et al., Protein Expr Purif 89(2):136-145 (2013), US 20110268656 (J591 ScFv); Frigerio et al, European J Cancer 49(9):2223-2232 (2013) (scFvD2B); WO 2006125481 (mAbs 3/Al2, 3/E7 and 3/F11) and single chain antibody fragments (scFv A5 and D7).

[0282] In one embodiment, an antigen binding domain against CD97 is an antigen binding portion, e.g., CDRs, of an antibody described in, e.g., U.S. Pat. No. 6,846,911; de Groot et al., J Immunol 183(6):4127-4134 (2009); or an antibody from R&D:MAB3734.

[0283] In one embodiment, an antigen binding domain against TAG72 is an antigen binding portion, e.g., CDRs, of an antibody described in, e.g., Hombach et al., Gastroenterology 113(4):1163-1170 (1997); and Abcam ab691.

[0284] In one embodiment, an antigen binding domain against CD44v6 is an antigen binding portion, e.g., CDRs, of an antibody described in, e.g., Casucci et al., Blood 122(20):3461-3472 (2013).

[0285] In one embodiment, an antigen binding domain against CEA is an antigen binding portion, e.g., CDRs, of an antibody described in, e.g., Chmielewski et al., Gastoenterology 143(4):1095-1107 (2012).

[0286] In one embodiment, an antigen binding domain against EPCAM is an antigen binding portion, e.g., CDRS, of an antibody selected from MT110, EpCAM-CD3 bispecific Ab (see, e.g., clinicaltrials.gov/ct2/show/NCT00635596); Edrecolomab; 3622W94; ING-1; and adecatumumab (MT201).

[0287] In one embodiment, an antigen binding domain against KIT is an antigen binding portion, e.g., CDRs, of an antibody described in, e.g., U.S. Pat. No. 7,915,391, US20120288506, and several commercial catalog antibodies.

[0288] In one embodiment, an antigen binding domain against IL-13Ra2 is an antigen binding portion, e.g., CDRs, of an antibody described in, e.g., WO2008/146911, WO2004087758, several commercial catalog antibodies, and WO2004087758.

[0289] In one embodiment, an antigen binding domain against CD171 is an antigen binding portion, e.g., CDRs, of an antibody described in, e.g., Hong et al., J Immunother 37(2):93-104 (2014).

[0290] In one embodiment, an antigen binding domain against PSCA is an antigen binding portion, e.g., CDRs, of an antibody described in, e.g., Morgenroth et al., Prostate 67(10):1121-1131 (2007) (scFv 7F5); Nejatollahi et al., J of Oncology 2013(2013), article ID 839831 (scFv C5-II); and US Pat Publication No. 20090311181.

[0291] In one embodiment, an antigen binding domain against MAD-CT-2 is an antigen binding portion, e.g., CDRs, of an antibody described in, e.g., PMID: 2450952; U.S. Pat. No. 7,635,753.

[0292] In one embodiment, an antigen binding domain against Folate receptor alpha is an antigen binding portion, e.g., CDRs, of the antibody IMGN853, or an antibody described in US20120009181; U.S. Pat. No. 4,851,332, LK26: U.S. Pat. No. 5,952,484.

[0293] In one embodiment, an antigen binding domain against ERBB2 (Her2/neu) is an antigen binding portion, e.g., CDRs, of the antibody trastuzumab, or pertuzumab.

[0294] In one embodiment, an antigen binding domain against MUC1 is an antigen binding portion, e.g., CDRs, of the antibody SAR566658.

[0295] In one embodiment, the antigen binding domain against EGFR is antigen binding portion, e.g., CDRs, of the antibody cetuximab, panitumumab, zalutumumab, nimotuzumab, or matuzumab.

[0296] In one embodiment, an antigen binding domain against NCAM is an antigen binding portion, e.g., CDRs, of the antibody clone 2-2B: MAB5324 (EMD Millipore)

[0297] In one embodiment, an antigen binding domain against CAIX is an antigen binding portion, e.g., CDRs, of the antibody clone 303123 (R&D Systems).

[0298] In one embodiment, an antigen binding domain against Fos-related antigen 1 is an antigen binding portion, e.g., CDRs, of the antibody 12F9 (Novus Biologicals).

[0299] In one embodiment, an antigen binding domain against SSEA-4 is an antigen binding portion, e.g., CDRs, of antibody MC813 (Cell Signaling), or other commercially available antibodies.

[0300] In one embodiment, an antigen binding domain against PDGFR-beta is an antigen binding portion, e.g., CDRs, of an antibody Abcam ab32570.

[0301] In one embodiment, an antigen binding domain against ALK is an antigen binding portion, e.g., CDRs, of an antibody described in, e.g., Mino-Kenudson et al., Clin Cancer Res 16(5):1561-1571 (2010).

[0302] In one embodiment, an antigen binding domain against plysialic acid is an antigen binding portion, e.g., CDRs, of an antibody described in, e.g., Nagae et al., J Biol Chem 288(47):33784-33796 (2013).

[0303] In one embodiment, an antigen binding domain against PLAC1 is an antigen binding portion, e.g., CDRs, of an antibody described in, e.g., Ghods et al., Biotechnol Appl Biochem 2013 doi:10.1002/bab.1177.

[0304] In one embodiment, an antigen binding domain against GloboH is an antigen binding portion of the antibody VK9; or an antibody described in, e.g., Kudryashov V et al, Glycoconj J.15(3):243-9 (1998), Lou et al., Proc Natl Acad Sci USA 111(7):2482-2487 (2014); MBr1: Bremer E-G et al. J Biol Chem 259:14773-14777 (1984).

[0305] In one embodiment, an antigen binding domain against NY-BR-1 is an antigen binding portion, e.g., CDRs of an antibody described in, e.g., Jager et al., Appl Immunohistochem Mol Morphol 15(1):77-83 (2007).

[0306] In one embodiment, an antigen binding domain against sperm protein 17 is an antigen binding portion, e.g., CDRs, of an antibody described in, e.g., Song et al., Target Oncol 2013 Aug. 14 (PMID: 23943313); Song et al., Med Oncol 29(4):2923-2931 (2012).

[0307] In one embodiment, an antigen binding domain against TRP-2 is an antigen binding portion, e.g., CDRs, of an antibody described in, e.g., Wang et al, J Exp Med. 184(6):2207-16 (1996).

[0308] In one embodiment, an antigen binding domain against CYP1B1 is an antigen binding portion, e.g., CDRs, of an antibody described in, e.g., Maecker et al, Blood 102 (9): 3287-3294 (2003).

[0309] In one embodiment, an antigen binding domain against RAGE-1 is an antigen binding portion, e.g., CDRs, of the antibody MAB5328 (EMD Millipore).

[0310] In one embodiment, an antigen binding domain against human telomerase reverse transcriptase is an antigen binding portion, e.g., CDRs, of the antibody cat no: LS-B95-100 (Lifespan Biosciences)

[0311] In one embodiment, an antigen binding domain against intestinal carboxyl esterase is an antigen binding portion, e.g., CDRs, of the antibody 4F12: cat no: LS-B6190-50 (Lifespan Biosciences).

[0312] In one embodiment, an antigen binding domain against mut hsp70-2 is an antigen binding portion, e.g., CDRs, of the antibody Lifespan Biosciences: monoclonal: cat no: LS-C133261-100 (Lifespan Biosciences).

[0313] In one embodiment, an antigen binding domain against MAD-CT-2 is an antigen binding portion, e.g., CDRs, of an antibody described in, e.g., PMID: 2450952; U.S. Pat. No. 7,635,753.

[0314] In one embodiment, the antigen binding domain comprises one, two three (e.g., all three) heavy chain CDRs, HC CDR1, HC CDR2 and HC CDR3, from an antibody listed above, and/or one, two, three (e.g., all three) light chain CDRs, LC CDR1, LC CDR2 and LC CDR3, from an antibody listed above. In one embodiment, the antigen binding domain comprises a heavy chain variable region and/or a variable light chain region of an antibody listed above.

[0315] In one embodiment, the antigen-binding domain of a CAR, e.g., the CAR expressed by a cell of the invention, can be chosen such that a myeloid tumor population is targeted. Alternatively, when targeting of more than one type of myeloid tumor is desired, an antigen binding domain that targets a myeloid tumor antigen that is expressed by more than one, e.g., all, of the myeloid tumors to be targeted can be selected.

[0316] In one aspect, the antigen-binding domain of a CAR, e.g., the CAR expressed by a cell of the invention, binds to CD123, e.g., human CD123. Any known CD123 binding domain may be used in the invention. In one embodiment, an antigen binding domain against CD123 is an antigen binding portion, e.g., CDRs or VH and VL, of an antibody, antigen-binding fragment or CAR described in, e.g., PCT publication WO2014/130635. In one embodiment, an antigen binding domain against CD123 is an antigen binding portion, e.g., CDRs or VH and VL, of an antibody, antigen-binding fragment or CAR described in, e.g., PCT publication WO2016/028896. In one embodiment, an antigen binding domain against CD123 is an antigen binding portion, e.g., CDRs, of an antibody, antigen-binding fragment, or CAR described in, e.g., PCT publication WO1997/024373, WO2008/127735 (e.g., a CD123 binding domain of 26292, 32701, 37716 or 32703), WO2014/138805 (e.g., a CD123 binding domain of CSL362), WO2014/138819, WO2013/173820, WO2014/144622, WO2001/66139, WO2010/126066 (e.g., the CD123 binding domain of any of Old4, Old5, Old17, Old19, New102, or Old6), WO2014/144622, or US2009/0252742. In embodiments, the antigen binding domain is or is derived from a murine anti-human CD123 binding domain. In embodiments, the antigen binding domain is a humanized antibody or antibody fragment, e.g., scFv domain. In an embodiment, the antigen binding domain is a human antibody or antibody fragment that binds to human CD123. In embodiments, the antigen binding domain is an scFv domain which includes a light chain variable region (VL) and a heavy chain variable region (VH). The VL and VH may attached by a linker described herein, e.g., comprising the sequence GGGGSGGGGSGGGGS (SEQ ID NO: 30), and may be in any orientation, e.g., VL-linker-VH, or VH-linker-VL.

[0317] In one embodiment, the human CD123 binding domain comprises one or more (e.g., all three) light chain complementary determining region 1 (LC CDR1), light chain complementary determining region 2 (LC CDR2), and light chain complementary determining region 3 (LC CDR3) of a human CD123 binding domain described herein, and/or one or more (e.g., all three) heavy chain complementary determining region 1 (HC CDR1), heavy chain complementary determining region 2 (HC CDR2), and heavy chain complementary determining region 3 (HC CDR3) of a human CD123 binding domain described herein, e.g., a human CD123 binding domain comprising one or more, e.g., all three, LC CDRs and one or more, e.g., all three, HC CDRs. In one embodiment, the human CD123 binding domain comprises one or more (e.g., all three) heavy chain complementary determining region 1 (HC CDR1), heavy chain complementary determining region 2 (HC CDR2), and heavy chain complementary determining region 3 (HC CDR3) of a human CD123 binding domain described herein, e.g., the human CD123 binding domain has two variable heavy chain regions, each comprising a HC CDR1, a HC CDR2 and a HC CDR3 described herein. In one embodiment, the human CD123 binding domain comprises a human light chain variable region described herein (e.g., in Table 26 or 28) and/or a human heavy chain variable region described herein (e.g., in Table 26 or 28). In one embodiment, the human CD123 binding domain comprises a human heavy chain variable region described herein (e.g., in Table 26 or 28), e.g., at least two human heavy chain variable regions described herein (e.g., in Table 26 or 28). In one embodiment, the CD123 binding domain is a scFv comprising a light chain and a heavy chain of an amino acid sequence of Table 26 or 28. In an embodiment, the CD123 binding domain (e.g., an scFv) comprises: a light chain variable region comprising an amino acid sequence having at least one, two or three modifications (e.g., substitutions) but not more than 30, 20 or 10 modifications (e.g., substitutions) of an amino acid sequence of a light chain variable region provided in Table 26 or 28, or a sequence with at least 95% identity, e.g., 95-99% identity, with an amino acid sequence of Table 26; and/or a heavy chain variable region comprising an amino acid sequence having at least one, two or three modifications (e.g., substitutions) but not more than 30, 20 or 10 modifications (e.g., substitutions) of an amino acid sequence of a heavy chain variable region provided in Table 26 or 28, or a sequence with at least 95% identity, e.g., 95-99% identity, to an amino acid sequence of Table 26 or 28. In one embodiment, the human CD123 binding domain comprises a sequence selected from a group consisting of SEQ ID NO:2157-2160, 2478, 2480, 2483, and 2485, or a sequence with at least 95% identity, e.g., 95-99% identity, thereof. In one embodiment, the human CD123 binding domain is a scFv, and a light chain variable region comprising an amino acid sequence described herein, e.g., in Table 26 or 28, is attached to a heavy chain variable region comprising an amino acid sequence described herein, e.g., in Table 26, via a linker, e.g., a linker described herein. In one embodiment, the human CD123 binding domain includes a (Gly₄-Ser)ₙ linker, wherein n is 1, 2, 3, 4, 5, or 6, preferably 3 or 4 (SEQ ID NO: 80). The light chain variable region and heavy chain variable region of a scFv can be, e.g., in any of the following orientations: light chain variable region-linker-heavy chain variable region or heavy chain variable region-linker-light chain variable region.

[0318] In some aspects, a non-human antibody is humanized, where specific sequences or regions of the antibody are modified to increase similarity to an antibody naturally produced in a human or fragment thereof. Thus, in one aspect, the antigen binding domain comprises a humanized antibody or an antibody fragment. In one embodiment, the humanized CD123 binding domain comprises one or more (e.g., all three) light chain complementary determining region 1 (LC CDR1), light chain complementary determining region 2 (LC CDR2), and light chain complementary determining region 3 (LC CDR3) of a humanized CD123 binding domain described herein, and/or one or more (e.g., all three) heavy chain complementary determining region 1 (HC CDR1), heavy chain complementary determining region 2 (HC CDR2), and heavy chain complementary determining region 3 (HC CDR3) of a humanized CD123 binding domain described herein, e.g., a humanized CD123 binding domain comprising one or more, e.g., all three, LC CDRs and one or more, e.g., all three, HC CDRs. In one embodiment, the humanized CD123 binding domain comprises one or more (e.g., all three) heavy chain complementary determining region 1 (HC CDR1), heavy chain complementary determining region 2 (HC CDR2), and heavy chain complementary determining region 3 (HC CDR3) of a humanized CD123 binding domain described herein, e.g., the humanized CD123 binding domain has two variable heavy chain regions, each comprising a HC CDR1, a HC CDR2 and a HC CDR3 described herein. In one embodiment, the humanized CD123 binding domain comprises a humanized light chain variable region described herein (e.g., in Table 27) and/or a humanized heavy chain variable region described herein (e.g., in Table 27). In one embodiment, the humanized CD123 binding domain comprises a humanized heavy chain variable region described herein (e.g., in Table 27), e.g., at least two humanized heavy chain variable regions described herein (e.g., in Table 27). In one embodiment, the CD123 binding domain is a scFv comprising a light chain and a heavy chain of an amino acid sequence of Table 27. In an embodiment, the CD123 binding domain (e.g., an scFv) comprises: a light chain variable region comprising an amino acid sequence having at least one, two or three modifications (e.g., substitutions) but not more than 30, 20 or 10 modifications (e.g., substitutions) of an amino acid sequence of a light chain variable region provided in Table 27, or a sequence with at least 95% identity, e.g., 95-99% identity, with an amino acid sequence of Table 27; and/or a heavy chain variable region comprising an amino acid sequence having at least one, two or three modifications (e.g., substitutions) but not more than 30, 20 or 10 modifications (e.g., substitutions) of an amino acid sequence of a heavy chain variable region provided in Table 27, or a sequence with at least 95% identity, e.g., 95-99% identity, to an amino acid sequence of Table 27. In one embodiment, the humanized CD123 binding domain comprises a sequence selected from a group consisting of SEQ ID NO:2184-2215 and 2302-2333, or a sequence with at least 95% identity, e.g., 95-99% identity, thereof. In one embodiment, the humanized CD123 binding domain is a scFv, and a light chain variable region comprising an amino acid sequence described herein, e.g., in Table 27, is attached to a heavy chain variable region comprising an amino acid sequence described herein, e.g., in Table 27, via a linker, e.g., a linker described herein. In one embodiment, the humanized CD123 binding domain includes a (Gly4-Ser)n linker, wherein n is 1, 2, 3, 4, 5, or 6, preferably 3 or 4 (SEQ ID NO: 80). The light chain variable region and heavy chain variable region of a scFv can be, e.g., in any of the following orientations: light chain variable region-linker-heavy chain variable region or heavy chain variable region-linker-light chain variable region.

[0319] Exemplary CD123 CAR constructs disclose herein comprise an scFv (e.g., a human scFv as disclosed in Tables 26, 27 and 28 herein, optionally preceded with an optional leader sequence (e.g., SEQ ID NO:2 and SEQ ID NO:3 for exemplary leader amino acid and nucleotide sequences, respectively). The sequences of the human scFv fragments (amino acid sequences of SEQ ID NOs:2157-2160) are provided herein in Table 26. The sequences of human scFv fragments, without the leader sequence, are provided herein in Table 28 (SEQ ID NOs: 2479, 2481, 2482, and 2484 for the nucleotide sequences, and SEQ ID NOs: 2478, 2480, 2483, and 2485 for the amino acid sequences). The CD123 CAR construct can further include an optional hinge domain, e.g., a CD8 hinge domain (e.g., including the amino acid sequence of SEQ ID NO: 4 or encoded by a nucleic acid sequence of SEQ ID NO:5); a transmembrane domain, e.g., a CD8 transmembrane domain (e.g., including the amino acid sequence of SEQ ID NO: 12 or encoded by the nucleotide sequence of SEQ ID NO: 13); an intracellular domain, e.g., a 4-1BB intracellular domain (e.g., including the amino acid sequence of SEQ ID NO: 14 or encoded by the nucleotide sequence of SEQ ID NO: 15; and a functional signaling domain, e.g., a CD3 zeta domain (e.g., including amino acid sequence of SEQ ID NO: 18 or 20, or encoded by the nucleotide sequence of SEQ ID NO: 19 or 21). In certain embodiments, the domains are contiguous with and in the same reading frame to form a single fusion protein. In other embodiments, the domain are in separate polypeptides, e.g., as in an RCAR molecule as described herein.

[0320] In certain embodiments, the full length CD123 CAR molecule includes the amino acid sequence of, or is encoded by the nucleotide sequence of, CD123-1, CD123-2, CD123-3, CD123-4, hzCD123-1, hzCD123-2, hzCD123-3, hzCD123-4, hzCD123-5, hzCD123-6, hzCD123-7, hzCD123-8, hzCD123-9, hzCD123-10, hzCD123-11, hzCD123-12, hzCD123-13, hzCD123-14, hzCD123-15, hzCD123-16, hzCD123-17, hzCD123-18, hzCD123-19, hzCD123-20, hzCD123-21, hzCD123-22, hzCD123-23, hzCD123-24, hzCD123-25, hzCD123-26, hzCD123-27, hzCD123-28, hzCD123-29, hzCD123-30, hzCD123-31, or hzCD123-32, provided in Table 26, 27, or 28, or a sequence substantially identical (e.g., with at least 95% identity, e.g., 95-99% identity) thereto.

[0321] In certain embodiments, the CD123 CAR molecule, or the CD123 antigen binding domain, includes the scFv amino acid sequence of CD123-1, CD123-2, CD123-3, CD123-4, hzCD123-1, hzCD123-2, hzCD123-3, hzCD123-4, hzCD123-5, hzCD123-6, hzCD123-7, hzCD123-8, hzCD123-9, hzCD123-10, hzCD123-11, hzCD123-12, hzCD123-13, hzCD123-14, hzCD123-15, hzCD123-16, hzCD123-17, hzCD123-18, hzCD123-19, hzCD123-20, hzCD123-21, hzCD123-22, hzCD123-23, hzCD123-24, hzCD123-25, hzCD123-26, hzCD123-27, hzCD123-28, hzCD123-29, hzCD123-30, hzCD123-31, or hzCD123-32, provided in Table 26, 27, or 28; or includes the scFv amino acid sequence of, or is encoded by the nucleotide sequence of, CD123-1, CD123-2, CD123-3, CD123-4, hzCD123-1, hzCD123-2, hzCD123-3, hzCD123-4, hzCD123-5, hzCD123-6, hzCD123-7, hzCD123-8, hzCD123-9, hzCD123-10, hzCD123-11, hzCD123-12, hzCD123-13, hzCD123-14, hzCD123-15, hzCD123-16, hzCD123-17, hzCD123-18, hzCD123-19, hzCD123-20, hzCD123-21, hzCD123-22, hzCD123-23, hzCD123-24, hzCD123-25, hzCD123-26, hzCD123-27, hzCD123-28, hzCD123-29, hzCD123-30, hzCD123-31, or hzCD123-32, or a sequence substantially identical (e.g., with at least 95% identity, e.g., 95-99% identity, or up to 20, 15, 10, 8, 6, 5, 4, 3, 2, or 1 amino acid changes) to any of the aforesaid sequences.

[0322] In certain embodiments, the CD123 CAR molecule, or the CD123 antigen binding domain, includes the heavy chain variable region and/or the light chain variable region of CD123-1, CD123-2, CD123-3, CD123-4, hzCD123-1, hzCD123-2, hzCD123-3, hzCD123-4, hzCD123-5, hzCD123-6, hzCD123-7, hzCD123-8, hzCD123-9, hzCD123-10, hzCD123-11, hzCD123-12, hzCD123-13, hzCD123-14, hzCD123-15, hzCD123-16, hzCD123-17, hzCD123-18, hzCD123-19, hzCD123-20, hzCD123-21, hzCD123-22, hzCD123-23, hzCD123-24, hzCD123-25, hzCD123-26, hzCD123-27, hzCD123-28, hzCD123-29, hzCD123-30, hzCD123-31, or hzCD123-32, provided in Table 26 or 27, or a sequence substantially identical (e.g., with at least 95% identity, e.g., 95-99% identity, or up to 20, 15, 10, 8, 6, 5, 4, 3, 2, or 1 amino acid changes) to any of the aforesaid sequences.

[0323] In certain embodiments, the CD123 CAR molecule, or the CD123 antigen binding domain, includes one, two or three CDRs from the heavy chain variable region (e.g., HCDR1, HCDR2 and/or HCDR3), provided in Table 16 or 18; and/or one, two or three CDRs from the light chain variable region (e.g., LCDR1, LCDR2 and/or LCDR3) of CD123-1, CD123-2, CD123-3, CD123-4, hzCD123-1, hzCD123-2, hzCD123-3, hzCD123-4, hzCD123-5, hzCD123-6, hzCD123-7, hzCD123-8, hzCD123-9, hzCD123-10, hzCD123-11, hzCD123-12, hzCD123-13, hzCD123-14, hzCD123-15, hzCD123-16, hzCD123-17, hzCD123-18, hzCD123-19, hzCD123-20, hzCD123-21, hzCD123-22, hzCD123-23, hzCD123-24, hzCD123-25, hzCD123-26, hzCD123-27, hzCD123-28, hzCD123-29, hzCD123-30, hzCD123-31, or hzCD123-32, provided in Table 17 or 19; or a sequence substantially identical (e.g., at least 95% identical, e.g., 95-99% identical, or up to 5, 4, 3, 2, or 1 amino acid changes) to any of the aforesaid sequences.

[0324] In certain embodiments, the CD123 CAR molecule, or the CD123 antigen binding domain, includes one, two or three CDRs from the heavy chain variable region (e.g., HCDR1, HCDR2 and/or HCDR3), provided in Table 20; and/or one, two or three CDRs from the light chain variable region (e.g., LCDR1, LCDR2 and/or LCDR3) of CD123-1, CD123-2, CD123-3, CD123-4, hzCD123-1, hzCD123-2, hzCD123-3, hzCD123-4, hzCD123-5, hzCD123-6, hzCD123-7, hzCD123-8, hzCD123-9, hzCD123-10, hzCD123-11, hzCD123-12, hzCD123-13, hzCD123-14, hzCD123-15, hzCD123-16, hzCD123-17, hzCD123-18, hzCD123-19, hzCD123-20, hzCD123-21, hzCD123-22, hzCD123-23, hzCD123-24, hzCD123-25, hzCD123-26, hzCD123-27, hzCD123-28, hzCD123-29, hzCD123-30, hzCD123-31, or hzCD123-32, provided in Table 21; or a sequence substantially identical (e.g., at least 95% identical, e.g., 95-99% identical, or up to 5, 4, 3, 2, or 1 amino acid changes) to any of the aforesaid sequences.

[0325] In certain embodiments, the CD123 molecule, or the CD123 antigen binding domain, includes one, two or three CDRs from the heavy chain variable region (e.g., HCDR1, HCDR2 and/or HCDR3), provided in Table 22; and/or one, two or three CDRs from the light chain variable region (e.g., LCDR1, LCDR2 and/or LCDR3) of CD123-1, CD123-2, CD123-3, CD123-4, hzCD123-1, hzCD123-2, hzCD123-3, hzCD123-4, hzCD123-5, hzCD123-6, hzCD123-7, hzCD123-8, hzCD123-9, hzCD123-10, hzCD123-11, hzCD123-12, hzCD123-13, hzCD123-14, hzCD123-15, hzCD123-16, hzCD123-17, hzCD123-18, hzCD123-19, hzCD123-20, hzCD123-21, hzCD123-22, hzCD123-23, hzCD123-24, hzCD123-25, hzCD123-26, hzCD123-27, hzCD123-28, hzCD123-29, hzCD123-30, hzCD123-31, or hzCD123-32, provided in Table 23; or a sequence substantially identical (e.g., at least 95% identical, e.g., 95-99% identical, or up to 5, 4, 3, 2, or 1 amino acid changes) to any of the aforesaid sequences.

[0326] The sequences of CDR sequences of the scFv domains are shown in Tables 16, 18, 20, and 22 for the heavy chain variable domains and in Tables 17, 19, 21, and 23 for the light chain variable domains. “ID” stands for the respective SEQ ID NO for each CDR.

[0327] The CDRs provided in Tables 16, 17, 18, and 19 are according to a combination of the Kabat and Chothia numbering scheme.

TABLE 16
Heavy Chain Variable Domain CDRs

| | | SEQ | | SEQ | | SEQ |
|---|---|---|---|---|---|---|
| | | ID | | ID | | ID |
| Candidate | HCDR1 | NO: | HCDR2 | NO: | HCDR3 | NO: |
| CAR123-2 | GYTFTGYYMH | 2335 | WINPNSGGTNYAQKFQG | 2363 | DMNILATVPFDI | 2391 |
| CAR123-3 | GYIFTGYYIH | 2337 | WINPNSGGTNYAQKFQG | 2364 | DMNILATVPFDI | 2392 |
| CAR123-4 | GYTFTGYYMH | 2336 | WINPNSGGTNYAQKFQG | 2365 | DMNILATVPFDI | 2393 |
| CAR123-1 | GYTFTDYYMH | 2334 | WINPNSGDTNYAQKFQG | 2362 | DMNILATVPFDI | 2390 |

TABLE 17
Light Chain Variable Domain CDRs

| | | SEQ ID | | SEQ ID | | SEQ ID |
|---|---|---|---|---|---|---|
| Candidate | LCDR1 | NO: | LCDR2 | NO: | LCDR3 | NO: |
| CAR123-2 | RASQSISSYLN | 2419 | AAFSLQS | 2447 | QQGDSVPLT | 2475 |
| CAR123-3 | RASQSISSYLN | 2420 | AASSLQS | 2448 | QQGDSVPLT | 2476 |
| CAR123-4 | RASQSISSYLN | 2421 | AASSLQS | 2449 | QQGDSVPLT | 2477 |
| CAR123-1 | RASQSISTYLN | 2418 | AASSLQS | 2446 | QQGDSVPLT | 2474 |

TABLE 18
Heavy Chain Variable Domain CDR

| | | SEQ | | SEQ | | SEQ |
|---|---|---|---|---|---|---|
| | | ID | | ID | | ID |
| | HCDR1 | NO: | HCDR2 | NO: | HCDR3 | NO: |
| hzCAR123 | GYTFTSYWMN | 2361 | RIDPYDSET | 2389 | GNWDDY | 2417 |
| | | | HYNQKFKD | | | |

TABLE 19
Light Chain Variable Domain CDR

| | | SEQ | | SEQ | | SEQ |
|---|---|---|---|---|---|---|
| | | ID | | ID | | ID |
| | LCDR1 | NO: | LCDR2 | NO: | LCDR3 | NO: |
| hzCAR123 | RASKSISKD | 2445 | SGSTLQS | 2473 | QQHNKYPYT | 2515 |
| | LA | | | | | |

TABLE 20
Heavy Chain Variable Domain CDRs according to the Kabat
numbering scheme (Kabat et al. (1991), “Sequences of
Proteins of Immunological Interest,” 5th Ed. Public Health
Service, National Institutes of Health, Bethesda, MD)

| | | SEQ | | SEQ | | SEQ |
|---|---|---|---|---|---|---|
| | | ID | | ID | | ID |
| Candidate | HCDR1 | NO: | HCDR2 | NO: | HCDR3 | NO: |
| CAR123-2 | GYYMH | 2487 | WINPNSGGTNYAQKFQG | 2492 | DMNILATVPFDI | 2497 |
| CAR123-3 | GYYIH | 2488 | WINPNSGGTNYAQKFQG | 2493 | DMNILATVPFDI | 2498 |
| CAR123-4 | DYYMH | 2489 | WINPNSGDTNYAQKFQG | 2494 | DMNILATVPFDI | 2499 |
| CAR123-1 | GYYMH | 2486 | WINPNSGGTNYAQKFQG | 2491 | DMNILATVPFDI | 2496 |
| hzCAR123-1 | SYWMN | 2490 | RIDPYDSETHYNQKFKD | 2495 | GNWDDY | 2500 |
| hzCAR123-2 | SYWMN | 2490 | RIDPYDSETHYNQKFKD | 2495 | GNWDDY | 2500 |
| hzCAR123-3 | SYWMN | 2490 | RIDPYDSETHYNQKFKD | 2495 | GNWDDY | 2500 |
| hzCAR123-4 | SYWMN | 2490 | RIDPYDSETHYNQKFKD | 2495 | GNWDDY | 2500 |
| hzCAR123-5 | SYWMN | 2490 | RIDPYDSETHYNQKFKD | 2495 | GNWDDY | 2500 |
| hzCAR123-6 | SYWMN | 2490 | RIDPYDSETHYNQKFKD | 2495 | GNWDDY | 2500 |
| hzCAR123-7 | SYWMN | 2490 | RIDPYDSETHYNQKFKD | 2495 | GNWDDY | 2500 |
| hzCAR123-8 | SYWMN | 2490 | RIDPYDSETHYNQKFKD | 2495 | GNWDDY | 2500 |
| hzCAR123-9 | SYWMN | 2490 | RIDPYDSETHYNQKFKD | 2495 | GNWDDY | 2500 |
| hzCAR123-10 | SYWMN | 2490 | RIDPYDSETHYNQKFKD | 2495 | GNWDDY | 2500 |
| hzCAR123-11 | SYWMN | 2490 | RIDPYDSETHYNQKFKD | 2495 | GNWDDY | 2500 |
| hzCAR123-12 | SYWMN | 2490 | RIDPYDSETHYNQKFKD | 2495 | GNWDDY | 2500 |
| hzCAR123-13 | SYWMN | 2490 | RIDPYDSETHYNQKFKD | 2495 | GNWDDY | 2500 |
| hzCAR123-14 | SYWMN | 2490 | RIDPYDSETHYNQKFKD | 2495 | GNWDDY | 2500 |
| hzCAR123-15 | SYWMN | 2490 | RIDPYDSETHYNQKFKD | 2495 | GNWDDY | 2500 |
| hzCAR123-16 | SYWMN | 2490 | RIDPYDSETHYNQKFKD | 2495 | GNWDDY | 2500 |
| hzCAR123-17 | SYWMN | 2490 | RIDPYDSETHYNQKFKD | 2495 | GNWDDY | 2500 |
| hzCAR123-18 | SYWMN | 2490 | RIDPYDSETHYNQKFKD | 2495 | GNWDDY | 2500 |
| hzCAR123-19 | SYWMN | 2490 | RIDPYDSETHYNQKFKD | 2495 | GNWDDY | 2500 |
| hzCAR123-20 | SYWMN | 2490 | RIDPYDSETHYNQKFKD | 2495 | GNWDDY | 2500 |
| hzCAR123-21 | SYWMN | 2490 | RIDPYDSETHYNQKFKD | 2495 | GNWDDY | 2500 |
| hzCAR123-22 | SYWMN | 2490 | RIDPYDSETHYNQKFKD | 2495 | GNWDDY | 2500 |
| hzCAR123-23 | SYWMN | 2490 | RIDPYDSETHYNQKFKD | 2495 | GNWDDY | 2500 |
| hzCAR123-24 | SYWMN | 2490 | RIDPYDSETHYNQKFKD | 2495 | GNWDDY | 2500 |
| hzCAR123-25 | SYWMN | 2490 | RIDPYDSETHYNQKFKD | 2495 | GNWDDY | 2500 |
| hzCAR123-26 | SYWMN | 2490 | RIDPYDSETHYNQKFKD | 2495 | GNWDDY | 2500 |
| hzCAR123-27 | SYWMN | 2490 | RIDPYDSETHYNQKFKD | 2495 | GNWDDY | 2500 |
| hzCAR123-28 | SYWMN | 2490 | RIDPYDSETHYNQKFKD | 2495 | GNWDDY | 2500 |
| hzCAR123-29 | SYWMN | 2490 | RIDPYDSETHYNQKFKD | 2495 | GNWDDY | 2500 |
| hzCAR123-30 | SYWMN | 2490 | RIDPYDSETHYNQKFKD | 2495 | GNWDDY | 2500 |
| hzCAR123-31 | SYWMN | 2490 | RIDPYDSETHYNQKFKD | 2495 | GNWDDY | 2500 |
| hzCAR123-32 | SYWMN | 2490 | RIDPYDSETHYNQKFKD | 2495 | GNWDDY | 2500 |

TABLE 21
Light Chain Variable Domain CDRs according to the
Kabat numbering scheme (Kabat et al. (1991), “Sequences
of Proteins of Immunological Interest,” 5th Ed.
Public Health Service, National Institutes of Health,
Bethesda, MD)

| | | SEQ ID | | SEQ | | SEQ ID |
|---|---|---|---|---|---|---|
| Candidate | LCDR1 | NO: | LCDR2 | ID NO: | LCDR3 | NO: |
| CAR123-2 | RASQSISSYLN | 2502 | AASSLQS | 2507 | QQGDSVPLT | 2512 |
| CAR123-3 | RASQSISSYLN | 2503 | AASSLQS | 2508 | QQGDSVPLT | 2513 |
| CAR123-4 | RASQSISSYLN | 2504 | AASSLQS | 2509 | QQGDSVPLT | 2514 |
| CAR123-1 | RASQSISTYLN | 1501 | AAFSLQS | 2506 | QQGDSVPLT | 2511 |
| hzCAR123-1 | RASKSISKDLA | 2505 | SGSTLQS | 2510 | QQHNKYPYT | 2515 |
| hzCAR123-2 | RASKSISKDLA | 2505 | SGSTLQS | 2510 | QQHNKYPYT | 2515 |
| hzCAR123-3 | RASKSISKDLA | 2505 | SGSTLQS | 2510 | QQHNKYPYT | 2515 |
| hzCAR123-4 | RASKSISKDLA | 2505 | SGSTLQS | 2510 | QQHNKYPYT | 2515 |
| hzCAR123-5 | RASKSISKDLA | 2505 | SGSTLQS | 2510 | QQHNKYPYT | 2515 |
| hzCAR123-6 | RASKSISKDLA | 2505 | SGSTLQS | 2510 | QQHNKYPYT | 2515 |
| hzCAR123-7 | RASKSISKDLA | 2505 | SGSTLQS | 2510 | QQHNKYPYT | 2515 |
| hzCAR123-8 | RASKSISKDLA | 2505 | SGSTLQS | 2510 | QQHNKYPYT | 2515 |
| hzCAR123-10 | RASKSISKDLA | 2505 | SGSTLQS | 2510 | QQHNKYPYT | 2515 |
| hzCAR123-10 | RASKSISKDLA | 2505 | SGSTLQS | 2510 | QQHNKYPYT | 2515 |
| hzCAR123-11 | RASKSISKDLA | 2505 | SGSTLQS | 2510 | QQHNKYPYT | 2515 |
| hzCAR123-12 | RASKSISKDLA | 2505 | SGSTLQS | 2510 | QQHNKYPYT | 2515 |
| hzCAR123-13 | RASKSISKDLA | 2505 | SGSTLQS | 2510 | QQHNKYPYT | 2515 |
| hzCAR123-14 | RASKSISKDLA | 2505 | SGSTLQS | 2510 | QQHNKYPYT | 2515 |
| hzCAR123-15 | RASKSISKDLA | 2505 | SGSTLQS | 2510 | QQHNKYPYT | 2515 |
| hzCAR123-16 | RASKSISKDLA | 2505 | SGSTLQS | 2510 | QQHNKYPYT | 2515 |
| hzCAR123-17 | RASKSISKDLA | 2505 | SGSTLQS | 2510 | QQHNKYPYT | 2515 |
| hzCAR123-18 | RASKSISKDLA | 2505 | SGSTLQS | 2510 | QQHNKYPYT | 2515 |
| hzCAR123-19 | RASKSISKDLA | 2505 | SGSTLQS | 2510 | QQHNKYPYT | 2515 |
| hzCAR123-20 | RASKSISKDLA | 2505 | SGSTLQS | 2510 | QQHNKYPYT | 2515 |
| hzCAR123-21 | RASKSISKDLA | 2505 | SGSTLQS | 2510 | QQHNKYPYT | 2515 |
| hzCAR123-22 | RASKSISKDLA | 2505 | SGSTLQS | 2510 | QQHNKYPYT | 2515 |
| hzCAR123-23 | RASKSISKDLA | 2505 | SGSTLQS | 2510 | QQHNKYPYT | 2515 |
| hzCAR123-24 | RASKSISKDLA | 2505 | SGSTLQS | 2510 | QQHNKYPYT | 2515 |
| hzCAR123-25 | RASKSISKDLA | 2505 | SGSTLQS | 2510 | QQHNKYPYT | 2515 |
| hzCAR123-26 | RASKSISKDLA | 2505 | SGSTLQS | 2510 | QQHNKYPYT | 2515 |
| hzCAR123-27 | RASKSISKDLA | 2505 | SGSTLQS | 2510 | QQHNKYPYT | 2515 |
| hzCAR123-28 | RASKSISKDLA | 2505 | SGSTLQS | 2510 | QQHNKYPYT | 2515 |
| hzCAR123-29 | RASKSISKDLA | 2505 | SGSTLQS | 2510 | QQHNKYPYT | 2515 |
| hzCAR123-30 | RASKSISKDLA | 2505 | SGSTLQS | 2510 | QQHNKYPYT | 2515 |
| hzCAR123-31 | RASKSISKDLA | 2505 | SGSTLQS | 2510 | QQHNKYPYT | 2515 |
| hzCAR123-32 | RASKSISKDLA | 2505 | SGSTLQS | 2510 | QQHNKYPYT | 2515 |

TABLE 22
Heavy Chain Variable Domain CDRs according to the
Chothia numbering scheme (Al-Lazikani et al., (1997)
JMB 273, 927-948)

| | | SEQ ID | | SEQ ID | | SEQ ID |
|---|---|---|---|---|---|---|
| Candidate | HCDR1 | NO: | HCDR2 | NO: | HCDR3 | NO: |
| CAR123-2 | GYTFTGY | 2517 | NPNSGG | 2522 | DMNILATVPFDI | 2527 |
| CAR123-3 | GYIFTGY | 2518 | NPNSGG | 2523 | DMNILATVPFDI | 2528 |
| CAR123-4 | GYTFTDY | 2519 | NPNSGD | 2524 | DMNILATVPFDI | 2529 |
| CAR123-1 | GYTFTGY | 2516 | NPNSGG | 2521 | DMNILATVPFDI | 2526 |
| hzCAR123-1 | GYTFTSY | 2520 | DPYDSE | 2525 | GNWDDY | 2530 |
| hzCAR123-2 | GYTFTSY | 2520 | DPYDSE | 2525 | GNWDDY | 2530 |
| hzCAR123-3 | GYTFTSY | 2520 | DPYDSE | 2525 | GNWDDY | 2530 |
| hzCAR123-4 | GYTFTSY | 2520 | DPYDSE | 2525 | GNWDDY | 2530 |
| hzCAR123-5 | GYTFTSY | 2520 | DPYDSE | 2525 | GNWDDY | 2530 |
| hzCAR123-6 | GYTFTSY | 2520 | DPYDSE | 2525 | GNWDDY | 2530 |
| hzCAR123-7 | GYTFTSY | 2520 | DPYDSE | 2525 | GNWDDY | 2530 |
| hzCAR123-8 | GYTFTSY | 2520 | DPYDSE | 2525 | GNWDDY | 2530 |
| hzCAR123-9 | GYTFTSY | 2520 | DPYDSE | 2525 | GNWDDY | 2530 |
| hzCAR123-10 | GYTFTSY | 2520 | DPYDSE | 2525 | GNWDDY | 2530 |
| hzCAR123-11 | GYTFTSY | 2520 | DPYDSE | 2525 | GNWDDY | 2530 |
| hzCAR123-12 | GYTFTSY | 2520 | DPYDSE | 2525 | GNWDDY | 2530 |
| hzCAR123-13 | GYTFTSY | 2520 | DPYDSE | 2525 | GNWDDY | 2530 |
| hzCAR123-14 | GYTFTSY | 2520 | DPYDSE | 2525 | GNWDDY | 2530 |
| hzCAR123-15 | GYTFTSY | 2520 | DPYDSE | 2525 | GNWDDY | 2530 |
| hzCAR123-16 | GYTFTSY | 2520 | DPYDSE | 2525 | GNWDDY | 2530 |
| hzCAR123-17 | GYTFTSY | 2520 | DPYDSE | 2525 | GNWDDY | 2530 |
| hzCAR123-18 | GYTFTSY | 2520 | DPYDSE | 2525 | GNWDDY | 2530 |
| hzCAR123-19 | GYTFTSY | 2520 | DPYDSE | 2525 | GNWDDY | 2530 |
| hzCAR123-20 | GYTFTSY | 2520 | DPYDSE | 2525 | GNWDDY | 2530 |
| hzCAR123-21 | GYTFTSY | 2520 | DPYDSE | 2525 | GNWDDY | 2530 |
| hzCAR123-22 | GYTFTSY | 2520 | DPYDSE | 2525 | GNWDDY | 2530 |
| hzCAR123-23 | GYTFTSY | 2520 | DPYDSE | 2525 | GNWDDY | 2530 |
| hzCAR123-24 | GYTFTSY | 2520 | DPYDSE | 2525 | GNWDDY | 2530 |
| hzCAR123-25 | GYTFTSY | 2520 | DPYDSE | 2525 | GNWDDY | 2530 |
| hzCAR123-26 | GYTFTSY | 2520 | DPYDSE | 2525 | GNWDDY | 2530 |
| hzCAR123-27 | GYTFTSY | 2520 | DPYDSE | 2525 | GNWDDY | 2530 |
| hzCAR123-28 | GYTFTSY | 2520 | DPYDSE | 2525 | GNWDDY | 2530 |
| hzCAR123-29 | GYTFTSY | 2520 | DPYDSE | 2525 | GNWDDY | 2530 |
| hzCAR123-30 | GYTFTSY | 2520 | DPYDSE | 2525 | GNWDDY | 2530 |
| hzCAR123-31 | GYTFTSY | 2520 | DPYDSE | 2525 | GNWDDY | 2530 |
| hzCAR123-32 | GYTFTSY | 2520 | DPYDSE | 2525 | GNWDDY | 2530 |

TABLE 23
Light Chain Variable Domain CDRs according to the
Chothia numbering scheme (Al-Lazikani et al.,
(1997) JMB 273, 927-948)

| | | | | SEQ | | |
|---|---|---|---|---|---|---|
| | | SEQ ID | | ID | | SEQ ID |
| Candidate | LCDR1 | NO: | LCDR2 | NO: | LCDR3 | NO: |
| CAR123-2 | SQSISSY | 2532 | AAS | 2537 | GDSVPL | 2542 |
| CAR123-3 | SQSISSY | 2533 | AAS | 2538 | GDSVPL | 2543 |
| CAR123-4 | SQSISSY | 2534 | AAS | 2539 | GDSVPL | 2544 |
| CAR123-1 | SQSISTY | 2531 | AAF | 2536 | GDSVPL | 2541 |
| hzCAR123-1 | SKSISKD | 2535 | SGS | 2540 | HNKYPY | 2555 |
| hzCAR123-2 | SKSISKD | 2535 | SGS | 2540 | HNKYPY | 2555 |
| hzCAR123-3 | SKSISKD | 2535 | SGS | 2540 | HNKYPY | 2555 |
| hzCAR123-4 | SKSISKD | 2535 | SGS | 2540 | HNKYPY | 2555 |
| hzCAR123-5 | SKSISKD | 2535 | SGS | 2540 | HNKYPY | 2555 |
| hzCAR123-6 | SKSISKD | 2535 | SGS | 2540 | HNKYPY | 2555 |
| hzCAR123-7 | SKSISKD | 2535 | SGS | 2540 | HNKYPY | 2555 |
| hzCAR123-8 | SKSISKD | 2535 | SGS | 2540 | HNKYPY | 2555 |
| hzCAR123-10 | SKSISKD | 2535 | SGS | 2540 | HNKYPY | 2555 |
| hzCAR123-10 | SKSISKD | 2535 | SGS | 2540 | HNKYPY | 2555 |
| hzCAR123-11 | SKSISKD | 2535 | SGS | 2540 | HNKYPY | 2555 |
| hzCAR123-12 | SKSISKD | 2535 | SGS | 2540 | HNKYPY | 2555 |
| hzCAR123-13 | SKSISKD | 2535 | SGS | 2540 | HNKYPY | 2555 |
| hzCAR123-14 | SKSISKD | 2535 | SGS | 2540 | HNKYPY | 2555 |
| hzCAR123-15 | SKSISKD | 2535 | SGS | 2540 | HNKYPY | 2555 |
| hzCAR123-16 | SKSISKD | 2535 | SGS | 2540 | HNKYPY | 2555 |
| hzCAR123-17 | SKSISKD | 2535 | SGS | 2540 | HNKYPY | 2555 |
| hzCAR123-18 | SKSISKD | 2535 | SGS | 2540 | HNKYPY | 2555 |
| hzCAR123-19 | SKSISKD | 2535 | SGS | 2540 | HNKYPY | 2555 |
| hzCAR123-20 | SKSISKD | 2535 | SGS | 2540 | HNKYPY | 2555 |
| hzCAR123-21 | SKSISKD | 2535 | SGS | 2540 | HNKYPY | 2555 |
| hzCAR123-22 | SKSISKD | 2535 | SGS | 2540 | HNKYPY | 2555 |
| hzCAR123-23 | SKSISKD | 2535 | SGS | 2540 | HNKYPY | 2555 |
| hzCAR123-24 | SKSISKD | 2535 | SGS | 2540 | HNKYPY | 2555 |
| hzCAR123-25 | SKSISKD | 2535 | SGS | 2540 | HNKYPY | 2555 |
| hzCAR123-26 | SKSISKD | 2535 | SGS | 2540 | HNKYPY | 2555 |
| hzCAR123-27 | SKSISKD | 2535 | SGS | 2540 | HNKYPY | 2555 |
| hzCAR123-28 | SKSISKD | 2535 | SGS | 2540 | HNKYPY | 2555 |
| hzCAR123-29 | SKSISKD | 2535 | SGS | 2540 | HNKYPY | 2555 |
| hzCAR123-30 | SKSISKD | 2535 | SGS | 2540 | HNKYPY | 2555 |
| hzCAR123-31 | SKSISKD | 2535 | SGS | 2540 | HNKYPY | 2555 |
| hzCAR123-32 | SKSISKD | 2535 | SGS | 2540 | HNKYPY | 2555 |

[0328] In embodiments, CD123 single chain variable fragments are generated and cloned into lentiviral CAR expression vectors with the intracellular CD3zeta domain and the intracellular co-stimulatory domain of 4-1BB. Names of exemplary fully human CD123 scFvs are depicted in Table 24. Names of exemplary humanized CD123 scFvs are depicted in Table 25.

TABLE 24
CAR-CD123 constructs

| Construct ID | CAR Nickname |
|---|---|
| EBB-C1357-F11 | CAR123-1 |
| EBB-C1358-B10 | CAR123-2 |
| EBB-C1358-D5 | CAR123-3 |
| EBB-C1357-C4 | CAR123-4 |

TABLE 25
CAR-CD123 constructs

| Construct ID | CAR Nickname |
|---|---|
| VH1_1-46_X_VK1_L8 | hzCAR-1 |
| VH1_1-46_X_VK3_L6 | hzCAR-2 |
| VH1_1-46_X_VK6_A14 | hzCAR-3 |
| VH1_1-46_X_VK4_B3 | hzCAR-4 |
| VK1_L8_X_VH1_1-46 | hzCAR-5 |
| VK3_L6_X_VH1_1-46 | hzCAR-6 |
| VK6_A14_X_VH1_1-46 | hzCAR-7 |
| VK4_B3_X_VH1_1-46 | hzCAR-8 |
| VH7_7-4.1_X_VK1_L8 | hzCAR-9 |
| VH7_7-4.1_X_VK3_L6 | hzCAR-10 |
| VH7_7-4.1_X_VK6_A14 | hzCAR-11 |
| VH7_7-4.1_X_VK4_B3 | hzCAR-12 |
| VK1_L8_X_VH7_7-4.1 | hzCAR-13 |
| VK3_L6_X_VH7_7-4.1 | hzCAR-14 |
| VK6_A14_X_VH7_7-4.1 | hzCAR-15 |
| VK4_B3_X_VH7_7-4.1 | hzCAR-16 |
| VH5_5-A_X_VK1_L8 | hzCAR-17 |
| VH5_5-A_X_VK3_L6 | hzCAR-18 |
| VH5_5-A_X_VK6_A14 | hzCAR-19 |
| VH5_5-A_X_VK4_B3 | hzCAR-20 |
| VK1_L8_X_VH5_5-A | hzCAR-21 |
| VK3_L6_X_VH5_5-A | hzCAR-22 |
| VK6_A14_X_VH5_5-A | hzCAR-23 |
| VK4_B3_X_VH5_5-A | hzCAR-24 |
| VH3_3-74_X_VK1_L8 | hzCAR-25 |
| VH3_3-74_X_VK3_L6 | hzCAR-26 |
| VH3_3-74_X_VK6_A14 | hzCAR-27 |
| VH3_3-74_X_VK4_B3 | hzCAR-28 |
| VK1_L8_X_VH3_3-74 | hzCAR-29 |
| VK3_L6_X_VH3_3-74 | hzCAR-30 |
| VK6_A14_X_VH3_3-74 | hzCAR-31 |
| VK4_B3_X_VH3_3-74 | hzCAR-32 |

[0329] In embodiments, the order in which the VL and VH domains appear in the scFv is varied (i.e., VL-VH, or VH-VL orientation), and where either three (SEQ ID NO: 30) or four (SEQ ID NO: 29) copies of the “G45” (SEQ ID NO: 22) subunit, in which each subunit comprises the sequence GGGGS (SEQ ID NO: 22) (e.g., (G4S)₃ (SEQ ID NO:30) or (G45)₄ (SEQ ID NO:29)), connect the variable domains to create the entirety of the scFv domain, as shown in Table 26, Table 27, and Table 28.

[0330] The amino acid and nucleic acid sequences of the CD123 scFv domains and CD123 CAR molecules are provided in Table 26, Table 27, and Table 28. The amino acid sequences for the variable heavy chain and variable light chain for each scFv is also provided in Table 26 and Table 27. It is noted that the scFv fragments (SEQ ID NOs: 2157-2160, and 2184-2215) with a leader sequence (e.g., the amino acid sequence of SEQ ID NO: 2 or the nucleotide sequence of SEQ ID NO: 3) and without a leader sequence (SEQ ID NOs: 2478, 2480, 2483, 2485, and 2556-2587) are also encompassed by the present invention.

[0331] In embodiments, these clones in Table 26 and 27 all contained a Q/K residue change in the signal domain of the co-stimulatory domain derived from CD3zeta chain.

TABLE 26
Exemplary CD123 CAR sequences

| | SEQ ID | |
|---|---|---|
| Name | NO: | Sequence |
| CAR123-2 | 2040 | atggccctccctgtcaccgccctgctgcttccgctggctcttctgctccac |
| NT | | gccgctcggccccaagtgcaactcgtccaaagcggagcggaagtcaagaaa |
| | | cccggagcgagcgtgaaagtgtcctgcaaagcctccggctacacctttacg |
| | | ggctactacatgcactgggtgcgccaggcaccaggacagggtcttgaatgg |
| | | atgggatggatcaaccctaattcgggcggaactaactacgcacagaagttc |
| | | caggggagagtgactctgactcgggatacctccatctcaactgtctacatg |
| | | gaactctcccgcttgcggtcagatgatacggcagtgtactactgcgcccgc |
| | | gacatgaatatcctggctaccgtgccgttcgacatctggggacaggggact |
| | | atggttactgtctcatcgggcggtggaggttcaggaggaggcggctcggga |
| | | ggcggaggttcggacattcagatgacccagtccccatcctctctgtcggcc |
| | | agcgtcggagatagggtgaccattacctgtcgggcctcgcaaagcatctcc |
| | | tcgtacctcaactggtatcagcaaaagccgggaaaggcgcctaagctgctg |
| | | atctacgccgcttcgagcttgcaaagcggggtgccatccagattctcggga |
| | | tcaggctcaggaaccgacttcaccctgaccgtgaacagcctccagccggag |
| | | gactttgccacttactactgccagcagggagactccgtgccgcttactttc |
| | | ggggggggtacccgcctggagatcaagaccactaccccagcaccgaggcca |
| | | cccaccccggctcctaccatcgcctcccagcctctgtccctgcgtccggag |
| | | gcatgtagacccgcagctggtggggccgtgcatacccggggtcttgacttc |
| | | gcctgcgatatctacatttgggcccctctggctggtacttgcggggtcctg |
| | | ctgctttcactcgtgatcactctttactgtaagcgcggtcggaagaagctg |
| | | ctgtacatctttaagcaacccttcatgaggcctgtgcagactactcaagag |
| | | gaggacggctgttcatgccggttcccagaggaggaggaaggcggctgcgaa |
| | | ctgcgcgtgaaattcagccgcagcgcagatgctccagcctacaagcagggg |
| | | cagaaccagctctacaacgaactcaatcttggtcggagagaggagtacgac |
| | | gtgctggacaagcggagaggacgggacccagaaatgggcgggaagccgcgc |
| | | agaaagaatccccaagagggcctgtacaacgagctccaaaaggataagatg |
| | | gcagaagcctatagcgagattggtatgaaaggggaacgcagaagaggcaaa |
| | | ggccacgacggactgtaccagggactcagcaccgccaccaaggacacctat |
| | | gacgctcttcacatgcaggccctgccgcctcgg |
| CAR123-2 | 2099 | MALPVTALLLPLALLLHAARPQVQLVQSGAEVKKPGASVKVSCKASGYTFT |
| AA | | GYYMHWVRQAPGQGLEWMGWINPNSGGTNYAQKFQGRVTLTRDTSISTVYM |
| | | ELSRLRSDDTAVYYCARDMNILATVPFDIWGQGTMVTVSSGGGGSGGGGSG |
| | | GGGSDIQMTQSPSSLSASVGDRVTITCRASQSISSYLNWYQQKPGKAPKLL |
| | | IYAASSLQSGVPSRFSGSGSGTDFTLTVNSLQPEDFATYYCQQGDSVPLTF |
| | | GGGTRLEIKTTTPAPRPPTPAPTIASQPLSLRPEACRPAAGGAVHTRGLDF |
| | | ACDIYIWAPLAGTCGVLLLSLVITLYCKRGRKKLLYIFKQPFMRPVQTTQE |
| | | EDGCSCRFPEEEEGGCELRVKFSRSADAPAYKQGQNQLYNELNLGRREEYD |
| | | VLDKRRGRDPEMGGKPRRKNPQEGLYNELQKDKMAEAYSEIGMKGERRRGK |
| | | GHDGLYQGLSTATKDTYDALHMQALPPR |
| CAR123-2 | 2158 | MALPVTALLLPLALLLHAARPQVQLVQSGAEVKKPGASVKVSCKASGYTFT |
| scFv | | GYYMHWVRQAPGQGLEWMGWINPNSGGTNYAQKFQGRVTLTRDTSISTVYM |
| | | ELSRLRSDDTAVYYCARDMNILATVPFDIWGQGTMVTVSSGGGGSGGGGSG |
| | | GGGSDIQMTQSPSSLSASVGDRVTITCRASQSISSYLNWYQQKPGKAPKLL |
| | | IYAASSLQSGVPSRFSGSGSGTDFTLTVNSLQPEDFATYYCQQGDSVPLTF |
| | | GGGTRLEIK |
| CAR123-2 | 2217 | QVQLVQSGAEVKKPGASVKVSCKASGYTFTGYYMHWVRQAPGQGLEWMGWI |
| VH | | NPNSGGTNYAQKFQGRVTLTRDTSISTVYMELSRLRSDDTAVYYCARDMNI |
| | | LATVPFDIWGQGTMVTVSS |
| CAR123-2 | 2276 | DIQMTQSPSSLSASVGDRVTITCRASQSISSYLNWYQQKPGKAPKLLIYAA |
| VL | | SSLQSGVPSRFSGSGSGTDFTLTVNSLQPEDFATYYCQQGDSVPLTFGGGT |
| | | RLEIK |
| CAR123-3 | 2041 | atggccctccctgtcaccgccctgctgcttccgctggctcttctgctccac |
| NT | | gccgctcggccccaagtccaactcgttcaatccggcgcagaagtcaagaag |
| | | ccaggagcatcagtgaaagtgtcctgcaaagcctcaggctacatcttcacg |
| | | ggatactacatccactgggtgcgccaggctccgggccagggccttgagtgg |
| | | atgggctggatcaaccctaactctgggggaaccaactacgctcagaagttc |
| | | caggggagggtcactatgactcgcgatacctccatctccactgcgtacatg |
| | | gaactctcgggactgagatccgacgatcctgccgtgtactactgcgcccgg |
| | | gacatgaacatcttggcgaccgtgccgtttgacatttggggacagggcacc |
| | | ctcgtcactgtgtcgagcggtggaggaggctcggggggtggcggatcagga |
| | | gggggaggaagcgacatccagctgactcagagcccatcgtcgttgtccgcg |
| | | tcggtgggggatagagtgaccattacttgccgcgccagccagagcatctca |
| | | tcatatctgaattggtaccagcagaagcccggaaaggccccaaaactgctg |
| | | atctacgctgcaagcagcctccaatcgggagtgccgtcacggttctccggg |
| | | tccggttcgggaactgactttaccctgaccgtgaattcgctgcaaccggag |
| | | gatttcgccacgtactactgtcagcaaggagactccgtgccgctgaccttc |
| | | ggtggaggcaccaaggtcgaaatcaagaccactaccccagcaccgaggcca |
| | | cccaccccggctcctaccatcgcctcccagcctctgtccctgcgtccggag |
| | | gcatgtagacccgcagctggtggggccgtgcatacccggggtcttgacttc |
| | | gcctgcgatatctacatttgggcccctctggctggtacttgcggggtcctg |
| | | ctgctttcactcgtgatcactctttactgtaagcgcggtcggaagaagctg |
| | | ctgtacatctttaagcaacccttcatgaggcctgtgcagactactcaagag |
| | | gaggacggctgttcatgccggttcccagaggaggaggaaggcggctgcgaa |
| | | ctgcgcgtgaaattcagccgcagcgcagatgctccagcctacaagcagggg |
| | | cagaaccagctctacaacgaactcaatcttggtcggagagaggagtacgac |
| | | gtgctggacaagcggagaggacgggacccagaaatgggcgggaagccgcgc |
| | | agaaagaatccccaagagggcctgtacaacgagctccaaaaggataagatg |
| | | gcagaagcctatagcgagattggtatgaaaggggaacgcagaagaggcaaa |
| | | ggccacgacggactgtaccagggactcagcaccgccaccaaggacacctat |
| | | gacgctcttcacatgcaggccctgccgcctcgg |
| CAR123-3 | 2100 | MALPVTALLLPLALLLHAARPQVQLVQSGAEVKKPGASVKVSCKASGYIFT |
| AA | | GYYIHWVRQAPGQGLEWMGWINPNSGGTNYAQKFQGRVTMTRDTSISTAYM |
| | | ELSGLRSDDPAVYYCARDMNILATVPFDIWGQGTLVTVSSGGGGSGGGGSG |
| | | GGGSDIQLTQSPSSLSASVGDRVTITCRASQSISSYLNWYQQKPGKAPKLL |
| | | IYAASSLQSGVPSRFSGSGSGTDFTLTVNSLQPEDFATYYCQQGDSVPLTF |
| | | GGGTKVEIKTTTPAPRPPTPAPTIASQPLSLRPEACRPAAGGAVHTRGLDF |
| | | ACDIYIWAPLAGTCGVLLLSLVITLYCKRGRKKLLYIFKQPFMRPVQTTQE |
| | | EDGCSCRFPEEEEGGCELRVKFSRSADAPAYKQGQNQLYNELNLGRREEYD |
| | | VLDKRRGRDPEMGGKPRRKNPQEGLYNELQKDKMAEAYSEIGMKGERRRGK |
| | | GHDGLYQGLSTATKDTYDALHMQALPPR |
| CAR123-3 | 2159 | MALPVTALLLPLALLLHAARPQVQLVQSGAEVKKPGASVKVSCKASGYIFT |
| scFv | | GYYIHWVRQAPGQGLEWMGWINPNSGGTNYAQKFQGRVTMTRDTSISTAYM |
| | | ELSGLRSDDPAVYYCARDMNILATVPFDIWGQGTLVTVSSGGGGSGGGGSG |
| | | GGGSDIQLTQSPSSLSASVGDRVTITCRASQSISSYLNWYQQKPGKAPKLL |
| | | IYAASSLQSGVPSRFSGSGSGTDFTLTVNSLQPEDFATYYCQQGDSVPLTF |
| | | GGGTKVEIK |
| CAR123-3 | 2218 | QVQLVQSGAEVKKPGASVKVSCKASGYIFTGYYIHWVRQAPGQGLEWMGWI |
| VH | | NPNSGGTNYAQKFQGRVTMTRDTSISTAYMELSGLRSDDPAVYYCARDMNI |
| | | LATVPFDIWGQGTLVTVSS |
| CAR123-3 | 2277 | DIQLTQSPSSLSASVGDRVTITCRASQSISSYLNWYQQKPGKAPKLLIYAA |
| VL | | SSLQSGVPSRFSGSGSGTDFTLTVNSLQPEDFATYYCQQGDSVPLTFGGGT |
| | | KVEIK |
| CAR123-4 | 2042 | atggccctccctgtcaccgccctgctgcttccgctggctcttctgctccac |
| NT | | gccgctcggccccaagtccaactccaacagtcaggcgcagaagtgaaaaag |
| | | agcggtgcatcggtgaaagtgtcatgcaaagcctcgggctacaccttcact |
| | | gactactatatgcactggctgcggcaggcaccgggacagggacttgagtgg |
| | | atgggatggatcaacccgaattcaggggacactaactacgcgcagaagttc |
| | | caggggagagtgaccctgacgagggacacctcaatttcgaccgtctacatg |
| | | gaattgtcgcgcctgagatcggacgatactgctgtgtactactgtgcccgc |
| | | gacatgaacatcctcgcgactgtgccttttgatatctggggacaggggact |
| | | atggtcaccgtttcctccgcttccggtggcggaggctcgggaggccgggcc |
| | | tccggtggaggaggcagcgacatccagatgactcagagcccttcctcgctg |
| | | agcgcctcagtgggagatcgcgtgaccatcacttgccgggccagccagtcc |
| | | atttcgtcctacctcaattggtaccagcagaagccgggaaaggcgcccaag |
| | | ctcttgatctacgctgcgagctccctgcaaagcggggtgccgagccgattc |
| | | tcgggttccggctcgggaaccgacttcactctgaccatctcatccctgcaa |
| | | ccagaggactttgccacctactactgccaacaaggagattctgtcccactg |
| | | acgttcggcggaggaaccaaggtcgaaatcaagaccactaccccagcaccg |
| | | aggccacccaccccggctcctaccatcgcctcccagcctctgtccctgcgt |
| | | ccggaggcatgtagacccgcagctggtggggccgtgcatacccggggtctt |
| | | gacttcgcctgcgatatctacatttgggcccctctggctggtacttgcggg |
| | | gtcctgctgctttcactcgtgatcactctttactgtaagcgcggtcggaag |
| | | aagctgctgtacatctttaagcaacccttcatgaggcctgtgcagactact |
| | | caagaggaggacggctgttcatgccggttcccagaggaggaggaaggcggc |
| | | tgcgaactgcgcgtgaaattcagccgcagcgcagatgctccagcctacaag |
| | | caggggcagaaccagctctacaacgaactcaatcttggtcggagagaggag |
| | | tacgacgtgctggacaagcggagaggacgggacccagaaatgggcgggaag |
| | | ccgcgcagaaagaatccccaagagggcctgtacaacgagctccaaaaggat |
| | | aagatggcagaagcctatagcgagattggtatgaaaggggaacgcagaaga |
| | | ggcaaaggccacgacggactgtaccagggactcagcaccgccaccaaggac |
| | | acctatgacgctcttcacatgcaggccctgccgcctcgg |
| CAR123-4 | 2101 | MALPVTALLLPLALLLHAARPQVQLQQSGAEVKKSGASVKVSCKASGYTFT |
| AA | | DYYMHWLRQAPGQGLEWMGWINPNSGDTNYAQKFQGRVTLTRDTSISTVYM |
| | | ELSRLRSDDTAVYYCARDMNILATVPFDIWGQGTMVTVSSASGGGGSGGRA |
| | | SGGGGSDIQMTQSPSSLSASVGDRVTITCRASQSISSYLNWYQQKPGKAPK |
| | | LLIYAASSLQSGVPSRFSGSGSGTDFTLTISSLQPEDFATYYCQQGDSVPL |
| | | TFGGGTKVEIKTTTPAPRPPTPAPTIASQPLSLRPEACRPAAGGAVHTRGL |
| | | DFACDIYIWAPLAGTCGVLLLSLVITLYCK |
| CAR123-4 | 2160 | MALPVTALLLPLALLLHAARPQVQLQQSGAEVKKSGASVKVSCKASGYTFT |
| scFv | | DYYMHWLRQAPGQGLEWMGWINPNSGDTNYAQKFQGRVTLTRDTSISTVYM |
| | | ELSRLRSDDTAVYYCARDMNILATVPFDIWGQGTMVTVSSASGGGGSGGRA |
| | | SGGGGSDIQMTQSPSSLSASVGDRVTITCRASQSISSYLNWYQQKPGKAPK |
| | | LLIYAASSLQSGVPSRFSGSGSGTDFTLTISSLQPEDFATYYCQQGDSVPL |
| | | TFGGGTKVEIK |
| CAR123-4 | 2219 | QVQLQQSGAEVKKSGASVKVSCKASGYTFTDYYMHWLRQAPGQGLEWMGWI |
| VH | | NPNSGDTNYAQKFQGRVTLTRDTSISTVYMELSRLRSDDTAVYYCARDMNI |
| | | LATVPFDIWGQGTMVTVSS |
| CAR123-4 | 2278 | DIQMTQSPSSLSASVGDRVTITCRASQSISSYLNWYQQKPGKAPKLLIYAA |
| VL | | SSLQSGVPSRFSGSGSGTDFTLTISSLQPEDFATYYCQQGDSVPLTFGGGT |
| | | KVEIK |
| CAR123-1 | 2039 | atggccctccctgtcaccgccctgctgcttccgctggctcttctgctccac |
| NT | | gccgctcggccccaagtccaactcgtccagtcaggagcggaagtcaagaag |
| | | cccggagcgtcagtcaaagtgtcatgcaaagcctcgggctacactttcact |
| | | gggtactacatgcactgggtgcgccaggctccaggacagggactggaatgg |
| | | atgggatggatcaacccgaactccggtggcaccaattacgcccagaagttc |
| | | caggggagggtgaccatgactcgcgacacgtcgatcagcaccgcatacatg |
| | | gagctgtcaagactccggtccgacgatactgccgtgtactactgcgcacgg |
| | | gacatgaacattctggccaccgtgccttttgacatctggggtcagggaact |
| | | atggttaccgtgtcctctggtggaggcggctccggcggggggggaagcgga |
| | | ggcggtggaagcgacattcagatgacccagtcgccttcatccctttcggcg |
| | | agcgtgggagatcgcgtcactatcacttgtcgggcctcgcagtccatctcc |
| | | acctacctcaattggtaccagcagaagccaggaaaagcaccgaatctgctg |
| | | atctacgccgcgttttccttgcaatcgggagtgccaagcagattcagcgga |
| | | tcgggatcaggcactgatttcaccctcaccatcaactcgctgcaaccggag |
| | | gatttcgctacgtactattgccaacaaggagacagcgtgccgctcaccttc |
| | | ggcggagggactaagctggaaatcaagaccactaccccagcaccgaggcca |
| | | cccaccccggctcctaccatcgcctcccagcctctgtccctgcgtccggag |
| | | gcatgtagacccgcagctggtggggccgtgcatacccggggtcttgacttc |
| | | gcctgcgatatctacatttgggcccctctggctggtacttgcggggtcctg |
| | | ctgctttcactcgtgatcactctttactgtaagcgcggtcggaagaagctg |
| | | ctgtacatctttaagcaacccttcatgaggcctgtgcagactactcaagag |
| | | gaggacggctgttcatgccggttcccagaggaggaggaaggcggctgcgaa |
| | | ctgcgcgtgaaattcagccgcagcgcagatgctccagcctacaagcagggg |
| | | cagaaccagctctacaacgaactcaatcttggtcggagagaggagtacgac |
| | | gtgctggacaagcggagaggacgggacccagaaatgggcgggaagccgcgc |
| | | agaaagaatccccaagagggcctgtacaacgagctccaaaaggataagatg |
| | | gcagaagcctatagcgagattggtatgaaaggggaacgcagaagaggcaaa |
| | | ggccacgacggactgtaccagggactcagcaccgccaccaaggacacctat |
| | | gacgctcttcacatgcaggccctgccgcctcgg |
| CAR123-1 | 2098 | malpvtalllplalllhaarpqvqlvqsgaevkkpgasvkvsckasgytft |
| AA | | gyymhwvrqapgqglewmgwinpnsggtnyaqkfqgrvtmtrdtsistaym |
| | | elsrlrsddtavyycardmnilatvpfdiwgqgtmvtvssggggsggggsg |
| | | gggsdiqmtqspsslsasvgdrvtitcrasqsistylnwyqqkpgkapnll |
| | | iyaafslqsgvpsrfsgsgsgtdftltinslqpedfatyycqqgdsvpltf |
| | | gggtkleiktttpaprpptpaptiasqplslrpeacrpaaggavhtrgldf |
| | | acdiyiwaplagtcgvlllslvitlyckrgrkkllyifkqpfmrpvqttqe |
| | | edgcscrfpeeeeggcelrvkfsrsadapaykqgqnqlynelnlgrreeyd |
| | | vldkrrgrdpemggkprrknpqeglynelqkdkmaeayseigmkgerrrgk |
| | | ghdglyqglstatkdtydalhmqalppr |
| CAR123-1 | 2157 | malpvtalllplalllhaarpqvqlvqsgaevkkpgasvkvsckasgytft |
| scFv | | gyymhwvrqapgqglewmgwinpnsggtnyaqkfqgrvtmtrdtsistaym |
| | | elsrlrsddtavyycardmnilatvpfdiwgqgtmvtvssggggsggggsg |
| | | gggsdiqmtqspsslsasvgdrvtitcrasqsistylnwyqqkpgkapnll |
| | | iyaafslqsgvpsrfsgsgsgtdftltinslqpedfatyycqqgdsvpltf |
| | | gggtkleik |
| CAR123-1 | 2216 | QVQLVQSGAEVKKPGASVKVSCKASGYTFTGYYMHWVRQAPGQGLEWMGWI |
| VH | | NPNSGGTNYAQKFQGRVTMTRDTSISTAYMELSRLRSDDTAVYYCARDMNI |
| | | LATVPFDIWGQGTMVTVSS |
| CAR123-1 | 2275 | DIQMTQSPSSLSASVGDRVTITCRASQSISTYLNWYQQKPGKAPNLLIYAA |
| VL | | FSLQSGVPSRFSGSGSGTDFTLTINSLQPEDFATYYCQQGDSVPLTFGGGT |
| | | KLEIK |

TABLE 27
Humanized CD123 CAR Sequences

| | SEQ | |
|---|---|---|
| | ID | |
| Name | NO: | Sequence |
| hzCAR12 | 2066 | ATGGCCCTCCCTGTCACCGCCCTGCTGCTTCCGCTGGCTCTTCTGCTCCACGCCGCTCGGC |
| 3-1 NT | | CCCAAGTGCAGCTGGTCCAGTCGGGAGCCGAAGTCAAGAAGCCCGGCGCTAGCGTGAAAGT |
| | | GTCCTGCAAAGCCTCCGGGTACACATTCACCTCCTACTGGATGAATTGGGTCAGACAGGCG |
| | | CCCGGCCAGGGACTCGAGTGGATGGGAAGGATTGATCCTTACGACTCCGAAACCCATTACA |
| | | ACCAGAAGTTCAAGGACCGCGTGACCATGACTGTGGATAAGTCCACTTCCACCGCTTACAT |
| | | GGAGCTGTCCAGCCTGCGCTCCGAGGATACCGCAGTGTACTACTGCGCCCGGGGAAACTGG |
| | | GACGACTATTGGGGACAGGGAACTACCGTGACCGTGTCAAGCGGGGGTGGCGGTAGCGGAG |
| | | GAGGGGGCTCCGGCGGCGGCGGCTCAGGGGGCGGAGGAAGCGACGTGCAGCTCACCCAGTC |
| | | GCCCTCATTTCTGTCGGCCTCAGTGGGAGACAGAGTGACCATTACTTGTCGGGCCTCCAAG |
| | | AGCATCTCCAAGGACCTGGCCTGGTATCAGCAGAAGCCAGGAAAGGCGCCTAAGTTGCTCA |
| | | TCTACTCGGGGTCGACCCTGCAATCTGGCGTGCCGTCCCGGTTCTCCGGTTCGGGAAGCGG |
| | | TACCGAATTCACCCTTACTATCTCCTCCCTGCAACCGGAGGACTTCGCCACCTACTACTGC |
| | | CAACAGCACAACAAGTACCCGTACACTTTCGGGGGTGGCACGAAGGTCGAAATCAAGACCA |
| | | CTACCCCAGCACCGAGGCCACCCACCCCGGCTCCTACCATCGCCTCCCAGCCTCTGTCCCT |
| | | GCGTCCGGAggcatgtagacccgcagctggtggggccgtgcatacccggggtcttgacttc |
| | | gcctgcgatatctacatttgggcccctctggctggtacttgcggggtcctgctgctttcac |
| | | tcgtgatcactctttactgtaagcgcggtcggaagaagctgctgtacatctttaagcaacc |
| | | cttcatgaggcctgtgcagactactcaagaggaggacggctgttcatgccggttcccagag |
| | | gaggaggaaggcggctgcgaactgcgcgtgaaattcagccgcagcgcagatgctccagcct |
| | | acaagcaggggcagaaccagctctacaacgaactcaatcttggtcggagagaggagtacga |
| | | cgtgctggacaagcggagaggacgggacccagaaatgggcgggaagccgcgcagaaagaat |
| | | ccccaagagggcctgtacaacgagctccaaaaggataagatggcagaagcctatagcgaga |
| | | ttggtatgaaaggggaacgcagaagaggcaaaggccacgacggactgtaccagggactcag |
| | | caccgccaccaaggacacctatgacgctcttcacatgcaggccctgccgcctcgg |
| hzCAR12 | 2125 | MALPVTALLLPLALLLHAARPQVQLVQSGAEVKKPGASVKVSCKASGYTFTSYWMNWVRQA |
| 3-1 AA | | PGQGLEWMGRIDPYDSETHYNQKFKDRVTMTVDKSTSTAYMELSSLRSEDTAVYYCARGNW |
| | | DDYWGQGTTVTVSSGGGGSGGGGSGGGGSGGGGSDVQLTQSPSFLSASVGDRVTITCRASK |
| | | SISKDLAWYQQKPGKAPKLLIYSGSTLQSGVPSRFSGSGSGTEFTLTISSLQPEDFATYYC |
| | | QQHNKYPYTFGGGTKVEIKTTTPAPRPPTPAPTIASQPLSLRPEACRPAAGGAVHTRGLDF |
| | | ACDIYIWAPLAGTCGVLLLSLVITLYCKRGRKKLLYIFKQPFMRPVQTTQEEDGCSCRFPE |
| | | EEEGGCELRVKFSRSADAPAYKQGQNQLYNELNLGRREEYDVLDKRRGRDPEMGGKPRRKN |
| | | PQEGLYNELQKDKMAEAYSEIGMKGERRRGKGHDGLYQGLSTATKDTYDALHMQALPPR |
| hzCAR12 | 2184 | MALPVTALLLPLALLLHAARPQVQLVQSGAEVKKPGASVKVSCKASGYTFTSYWMNWVRQA |
| 3-1 | | PGQGLEWMGRIDPYDSETHYNQKFKDRVTMTVDKSTSTAYMELSSLRSEDTAVYYCARGNW |
| scFv | | DDYWGQGTTVTVSSGGGGSGGGGSGGGGSGGGGSDVQLTQSPSFLSASVGDRVTITCRASK |
| | | SISKDLAWYQQKPGKAPKLLIYSGSTLQSGVPSRFSGSGSGTEFTLTISSLQPEDFATYYC |
| | | QQHNKYPYTFGGGTKVEIK |
| hzCAR12 | 2243 | QVQLVQSGAEVKKPGASVKVSCKASGYTFTSYWMNWVRQAPGQGLEWMGRIDPYDSETHYN |
| 3-1 VH | | QKFKDRVTMTVDKSTSTAYMELSSLRSEDTAVYYCARGNWDDYWGQGTTVTVSS |
| hzCAR12 | 2302 | DVQLTQSPSFLSASVGDRVTITCRASKSISKDLAWYQQKPGKAPKLLIYSGSTLQSGVPSR |
| 3-1 VL | | FSGSGSGTEFTLTISSLQPEDFATYYCQQHNKYPYTFGGGTKVEIK |
| hzCAR12 | 2067 | ATGGCCCTCCCTGTCACCGCCCTGCTGCTTCCGCTGGCTCTTCTGCTCCACGCCGCTCGGC |
| 3-2 NT | | CCCAAGTGCAGCTGGTCCAGTCGGGAGCCGAAGTCAAGAAGCCCGGCGCTAGCGTGAAAGT |
| | | GTCCTGCAAAGCCTCCGGGTACACATTCACCTCCTACTGGATGAATTGGGTCAGACAGGCG |
| | | CCCGGCCAGGGACTCGAGTGGATGGGAAGGATTGATCCTTACGACTCCGAAACCCATTACA |
| | | ACCAGAAGTTCAAGGACCGCGTGACCATGACTGTGGATAAGTCCACTTCCACCGCTTACAT |
| | | GGAGCTGTCCAGCCTGCGCTCCGAGGATACCGCAGTGTACTACTGCGCCCGGGGAAACTGG |
| | | GACGACTATTGGGGACAGGGAACTACCGTGACCGTGTCAAGCGGGGGTGGCGGTAGCGGAG |
| | | GAGGGGGCTCCGGCGGCGGCGGCTCAGGGGGCGGAGGAAGCGAAGTGGTGCTGACCCAGTC |
| | | GCCCGCAACCCTCTCTCTGTCGCCGGGAGAACGCGCCACTCTTTCCTGTCGGGCGTCCAAG |
| | | AGCATCTCAAAGGACCTCGCCTGGTACCAGCAGAAGCCTGGTCAAGCCCCGCGGCTGCTGA |
| | | TCTACTCCGGCTCCACGCTGCAATCAGGAATCCCAGCCAGATTTTCCGGTTCGGGGTCGGG |
| | | GACTGACTTCACCTTGACCATTAGCTCGCTGGAACCTGAGGACTTCGCCGTGTATTACTGC |
| | | CAGCAGCACAACAAGTACCCGTACACCTTCGGAGGCGGTACTAAGGTCGAGATCAAGACCA |
| | | CTACCCCAGCACCGAGGCCACCCACCCCGGCTCCTACCATCGCCTCCCAGCCTCTGTCCCT |
| | | GCGTCCGGAggcatgtagacccgcagctggtggggccgtgcatacccggggtcttgacttc |
| | | gcctgcgatatctacatttgggcccctctggctggtacttgcggggtcctgctgctttcac |
| | | tcgtgatcactctttactgtaagcgcggtcggaagaagctgctgtacatctttaagcaacc |
| | | cttcatgaggcctgtgcagactactcaagaggaggacggctgttcatgccggttcccagag |
| | | gaggaggaaggcggctgcgaactgcgcgtgaaattcagccgcagcgcagatgctccagcct |
| | | acaagcaggggcagaaccagctctacaacgaactcaatcttggtcggagagaggagtacga |
| | | cgtgctggacaagcggagaggacgggacccagaaatgggcgggaagccgcgcagaaagaat |
| | | ccccaagagggcctgtacaacgagctccaaaaggataagatggcagaagcctatagcgaga |
| | | ttggtatgaaaggggaacgcagaagaggcaaaggccacgacggactgtaccagggactcag |
| | | caccgccaccaaggacacctatgacgctcttcacatgcaggccctgccgcctcgg |
| hzCAR12 | 2126 | MALPVTALLLPLALLLHAARPQVQLVQSGAEVKKPGASVKVSCKASGYTFTSYWMNWVRQ |
| 3-2 AA | | APGQGLEWMGRIDPYDSETHYNQKFKDRVTMTVDKSTSTAYMELSSLRSEDTAVYYCARG |
| | | NWDDYWGQGTTVTVSSGGGGSGGGGSGGGGSGGGGSEVVLTQSPATLSLSPGERATLSCR |
| | | ASKSISKDLAWYQQKPGQAPRLLIYSGSTLQSGIPARFSGSGSGTDFTLTISSLEPEDFA |
| | | VYYCQQHNKYPYTFGGGTKVEIKTTTPAPRPPTPAPTIASQPLSLRPEACRPAAGGAVHT |
| | | RGLDFACDIYIWAPLAGTCGVLLLSLVITLYCKRGRKKLLYIFKQPFMRPVQTTQEEDGC |
| | | SCRFPEEEEGGCELRVKFSRSADAPAYKQGQNQLYNELNLGRREEYDVLDKRRGRDPEMG |
| | | GKPRRKNPQEGLYNELQKDKMAEAYSEIGMKGERRRGKGHDGLYQGLSTATKDTYDALHM |
| | | QALPPR |
| hzCAR12 | 2185 | MALPVTALLLPLALLLHAARPQVQLVQSGAEVKKPGASVKVSCKASGYTFTSYWMNWVRQ |
| 3-2 | | APGQGLEWMGRIDPYDSETHYNQKFKDRVTMTVDKSTSTAYMELSSLRSEDTAVYYCARG |
| scFv | | NWDDYWGQGTTVTVSSGGGGSGGGGSGGGGSGGGGSEVVLTQSPATLSLSPGERATLSCR |
| | | ASKSISKDLAWYQQKPGQAPRLLIYSGSTLQSGIPARFSGSGSGTDFTLTISSLEPEDFA |
| | | VYYCQQHNKYPYTFGGGTKVEIK |
| hzCAR12 | 2244 | QVQLVQSGAEVKKPGASVKVSCKASGYTFTSYWMNWVRQAPGQGLEWMGRIDPYDSETHYN |
| 3-2 VH | | QKFKDRVTMTVDKSTSTAYMELSSLRSEDTAVYYCARGNWDDYWGQGTTVTVSS |
| hzCAR12 | 2303 | EVVLTQSPATLSLSPGERATLSCRASKSISKDLAWYQQKPGQAPRLLIYSGSTLQSGIPAR |
| 3-2 VL | | FSGSGSGTDFTLTISSLEPEDFAVYYCQQHNKYPYTFGGGTKVEIK |
| hzCAR12 | 2068 | ATGGCCCTCCCTGTCACCGCCCTGCTGCTTCCGCTGGCTCTTCTGCTCCACGCCGCTCGGC |
| 3-3 NT | | CCCAAGTGCAGCTGGTCCAGTCGGGAGCCGAAGTCAAGAAGCCCGGCGCTAGCGTGAAAGT |
| | | GTCCTGCAAAGCCTCCGGGTACACATTCACCTCCTACTGGATGAATTGGGTCAGACAGGCG |
| | | CCCGGCCAGGGACTCGAGTGGATGGGAAGGATTGATCCTTACGACTCCGAAACCCATTACA |
| | | ACCAGAAGTTCAAGGACCGCGTGACCATGACTGTGGATAAGTCCACTTCCACCGCTTACAT |
| | | GGAGCTGTCCAGCCTGCGCTCCGAGGATACCGCAGTGTACTACTGCGCCCGGGGAAACTGG |
| | | GACGACTATTGGGGACAGGGAACTACCGTGACCGTGTCAAGCGGGGGTGGCGGTAGCGGAG |
| | | GAGGGGGCTCCGGCGGCGGCGGCTCAGGGGGCGGAGGAAGCGACGTCGTGATGACCCAGTC |
| | | ACCGGCATTCCTGTCCGTGACTCCCGGAGAAAAGGTCACGATTACTTGCCGGGCGTCCAAG |
| | | AGCATCTCCAAGGACCTCGCCTGGTACCAACAGAAGCCGGACCAGGCCCCTAAGCTGTTGA |
| | | TCTACTCGGGGTCCACCCTTCAATCGGGAGTGCCATCGCGGTTTAGCGGTTCGGGTTCTGG |
| | | GACCGACTTCACTTTCACCATCTCCTCACTGGAAGCCGAGGATGCCGCCACTTACTACTGT |
| | | CAGCAGCACAACAAGTATCCGTACACCTTCGGAGGCGGTACCAAAGTGGAGATCAAGACCA |
| | | CTACCCCAGCACCGAGGCCACCCACCCCGGCTCCTACCATCGCCTCCCAGCCTCTGTCCCT |
| | | GCGTCCGGAggcatgtagacccgcagctggtggggccgtgcatacccggggtcttgacttc |
| | | gcctgcgatatctacatttgggcccctctggctggtacttgcggggtcctgctgctttcac |
| | | tcgtgatcactctttactgtaagcgcggtcggaagaagctgctgtacatctttaagcaacc |
| | | cttcatgaggcctgtgcagactactcaagaggaggacggctgttcatgccggttcccagag |
| | | gaggaggaaggcggctgcgaactgcgcgtgaaattcagccgcagcgcagatgctccagcct |
| | | acaagcaggggcagaaccagctctacaacgaactcaatcttggtcggagagaggagtacga |
| | | cgtgctggacaagcggagaggacgggacccagaaatgggcgggaagccgcgcagaaagaat |
| | | ccccaagagggcctgtacaacgagctccaaaaggataagatggcagaagcctatagcgaga |
| | | ttggtatgaaaggggaacgcagaagaggcaaaggccacgacggactgtaccagggactcag |
| | | caccgccaccaaggacacctatgacgctcttcacatgcaggccctgccgcctcgg |
| hzCAR12 | 2127 | MALPVTALLLPLALLLHAARPQVQLVQSGAEVKKPGASVKVSCKASGYTFTSYWMNWVRQ |
| 3-3 AA | | APGQGLEWMGRIDPYDSETHYNQKFKDRVTMTVDKSTSTAYMELSSLRSEDTAVYYCARG |
| | | NWDDYWGQGTTVTVSSGGGGSGGGGSGGGGSGGGGSDVVMTQSPAFLSVTPGEKVTITCR |
| | | ASKSISKDLAWYQQKPDQAPKLLIYSGSTLQSGVPSRFSGSGSGTDFTFTISSLEAEDAA |
| | | TYYCQQHNKYPYTFGGGTKVEIKTTTPAPRPPTPAPTIASQPLSLRPEACRPAAGGAVHT |
| | | RGLDFACDIYIWAPLAGTCGVLLLSLVITLYCKRGRKKLLYIFKQPFMRPVQTTQEEDGC |
| | | SCRFPEEEEGGCELRVKFSRSADAPAYKQGQNQLYNELNLGRREEYDVLDKRRGRDPEMG |
| | | GKPRRKNPQEGLYNELQKDKMAEAYSEIGMKGERRRGKGHDGLYQGLSTATKDTYDALHM |
| | | QALPPR |
| hzCAR12 | 2186 | MALPVTALLLPLALLLHAARPQVQLVQSGAEVKKPGASVKVSCKASGYTFTSYWMNWVRQ |
| 3-3 | | APGQGLEWMGRIDPYDSETHYNQKFKDRVTMTVDKSTSTAYMELSSLRSEDTAVYYCARG |
| scFv | | NWDDYWGQGTTVTVSSGGGGSGGGGSGGGGSGGGGSDVVMTQSPAFLSVTPGEKVTITCR |
| | | ASKSISKDLAWYQQKPDQAPKLLIYSGSTLQSGVPSRFSGSGSGTDFTFTISSLEAEDAA |
| | | TYYCQQHNKYPYTFGGGTKVEIK |
| hzCAR12 | 2245 | QVQLVQSGAEVKKPGASVKVSCKASGYTFTSYWMNWVRQAPGQGLEWMGRIDPYDSETHYN |
| 3-3 VH | | QKFKDRVTMTVDKSTSTAYMELSSLRSEDTAVYYCARGNWDDYWGQGTTVTVSS |
| hzCAR12 | 2304 | DVVMTQSPAFLSVTPGEKVTITCRASKSISKDLAWYQQKPDQAPKLLIYSGSTLQSGVPSR |
| 3-3 VL | | FSGSGSGTDFTFTISSLEAEDAATYYCQQHNKYPYTFGGGTKVEIK |
| hzCAR12 | 2069 | ATGGCCCTCCCTGTCACCGCCCTGCTGCTTCCGCTGGCTCTTCTGCTCCACGCCGCTCGGC |
| 3-4 NT | | CCCAAGTGCAGCTGGTCCAGTCGGGAGCCGAAGTCAAGAAGCCCGGCGCTAGCGTGAAAGT |
| | | GTCCTGCAAAGCCTCCGGGTACACATTCACCTCCTACTGGATGAATTGGGTCAGACAGGCG |
| | | CCCGGCCAGGGACTCGAGTGGATGGGAAGGATTGATCCTTACGACTCCGAAACCCATTACA |
| | | ACCAGAAGTTCAAGGACCGCGTGACCATGACTGTGGATAAGTCCACTTCCACCGCTTACAT |
| | | GGAGCTGTCCAGCCTGCGCTCCGAGGATACCGCAGTGTACTACTGCGCCCGGGGAAACTGG |
| | | GACGACTATTGGGGACAGGGAACTACCGTGACCGTGTCAAGCGGGGGTGGCGGTAGCGGAG |
| | | GAGGGGGCTCCGGCGGCGGCGGCTCAGGGGGCGGAGGAAGCGACGTGGTCATGACTCAGTC |
| | | CCCGGACTCACTCGCGGTGTCGCTTGGAGAGAGAGCGACCATCAACTGTCGGGCCTCAAAG |
| | | AGCATCAGCAAGGACCTGGCCTGGTACCAGCAGAAGCCGGGACAGCCGCCAAAGCTGCTGA |
| | | TCTACTCCGGGTCCACCTTGCAATCTGGTGTCCCTGACCGGTTCTCCGGTTCCGGGTCGGG |
| | | TACCGACTTCACGCTCACTATTTCGTCGCTGCAAGCCGAAGATGTGGCCGTGTACTATTGC |
| | | CAACAGCACAACAAGTACCCCTACACTTTTGGCGGAGGCACCAAGGTGGAAATCAAGACCA |
| | | CTACCCCAGCACCGAGGCCACCCACCCCGGCTCCTACCATCGCCTCCCAGCCTCTGTCCCT |
| | | GCGTCCGGAggcatgtagacccgcagctggtggggccgtgcatacccggggtcttgacttc |
| | | gcctgcgatatctacatttgggcccctctggctggtacttgcggggtcctgctgctttcac |
| | | tcgtgatcactctttactgtaagcgcggtcggaagaagctgctgtacatctttaagcaacc |
| | | cttcatgaggcctgtgcagactactcaagaggaggacggctgttcatgccggttcccagag |
| | | gaggaggaaggcggctgcgaactgcgcgtgaaattcagccgcagcgcagatgctccagcct |
| | | acaagcaggggcagaaccagctctacaacgaactcaatcttggtcggagagaggagtacga |
| | | cgtgctggacaagcggagaggacgggacccagaaatgggcgggaagccgcgcagaaagaat |
| | | ccccaagagggcctgtacaacgagctccaaaaggataagatggcagaagcctatagcgaga |
| | | ttggtatgaaaggggaacgcagaagaggcaaaggccacgacggactgtaccagggactcag |
| | | caccgccaccaaggacacctatgacgctcttcacatgcaggccctgccgcctcgg |
| hzCAR12 | 2128 | MALPVTALLLPLALLLHAARPQVQLVQSGAEVKKPGASVKVSCKASGYTFTSYWMNWVRQ |
| 3-4 AA | | APGQGLEWMGRIDPYDSETHYNQKFKDRVTMTVDKSTSTAYMELSSLRSEDTAVYYCARG |
| | | NWDDYWGQGTTVTVSSGGGGSGGGGSGGGGSGGGGSDVVMTQSPDSLAVSLGERATINCR |
| | | ASKSISKDLAWYQQKPGQPPKLLIYSGSTLQSGVPDRFSGSGSGTDFTLTISSLQAEDVA |
| | | VYYCQQHNKYPYTFGGGTKVEIKTTTPAPRPPTPAPTIASQPLSLRPEACRPAAGGAVHT |
| | | RGLDFACDIYIWAPLAGTCGVLLLSLVITLYCKRGRKKLLYIFKQPFMRPVQTTQEEDGC |
| | | SCRFPEEEEGGCELRVKFSRSADAPAYKQGQNQLYNELNLGRREEYDVLDKRRGRDPEMG |
| | | GKPRRKNPQEGLYNELQKDKMAEAYSEIGMKGERRRGKGHDGLYQGLSTATKDTYDALHM |
| | | QALPPR |
| hzCAR12 | 2187 | MALPVTALLLPLALLLHAARPQVQLVQSGAEVKKPGASVKVSCKASGYTFTSYWMNWVRQ |
| 3-4 | | APGQGLEWMGRIDPYDSETHYNQKFKDRVTMTVDKSTSTAYMELSSLRSEDTAVYYCARG |
| scFv | | NWDDYWGQGTTVTVSSGGGGSGGGGSGGGGSGGGGSDVVMTQSPDSLAVSLGERATINCR |
| | | ASKSISKDLAWYQQKPGQPPKLLIYSGSTLQSGVPDRFSGSGSGTDFTLTISSLQAEDVA |
| | | VYYCQQHNKYPYTFGGGTKVEIK |
| hzCAR12 | 2246 | QVQLVQSGAEVKKPGASVKVSCKASGYTFTSYWMNWVRQAPGQGLEWMGRIDPYDSETHYN |
| 3-4 VH | | QKFKDRVTMTVDKSTSTAYMELSSLRSEDTAVYYCARGNWDDYWGQGTTVTVSS |
| hzCAR12 | 2305 | DVVMTQSPDSLAVSLGERATINCRASKSISKDLAWYQQKPGQPPKLLIYSGSTLQSGVPDR |
| 3-4 VL | | FSGSGSGTDFTLTISSLQAEDVAVYYCQQHNKYPYTFGGGTKVEIK |
| hzCAR12 | 2070 | ATGGCCCTCCCTGTCACCGCCCTGCTGCTTCCGCTGGCTCTTCTGCTCCACGCCGCTCGGC |
| 3-5 NT | | CCGACGTGCAGCTCACCCAGTCGCCCTCATTTCTGTCGGCCTCAGTGGGAGACAGAGTGAC |
| | | CATTACTTGTCGGGCCTCCAAGAGCATCTCCAAGGACCTGGCCTGGTATCAGCAGAAGCCA |
| | | GGAAAGGCGCCTAAGTTGCTCATCTACTCGGGGTCGACCCTGCAATCTGGCGTGCCGTCCC |
| | | GGTTCTCCGGTTCGGGAAGCGGTACCGAATTCACCCTTACTATCTCCTCCCTGCAACCGGA |
| | | GGACTTCGCCACCTACTACTGCCAACAGCACAACAAGTACCCGTACACTTTCGGGGGTGGC |
| | | ACGAAGGTCGAAATCAAGGGGGGTGGCGGTAGCGGAGGAGGGGGCTCCGGCGGCGGCGGCT |
| | | CAGGGGGCGGAGGAAGCCAAGTGCAGCTGGTCCAGTCGGGAGCCGAAGTCAAGAAGCCCGG |
| | | CGCTAGCGTGAAAGTGTCCTGCAAAGCCTCCGGGTACACATTCACCTCCTACTGGATGAAT |
| | | TGGGTCAGACAGGCGCCCGGCCAGGGACTCGAGTGGATGGGAAGGATTGATCCTTACGACT |
| | | CCGAAACCCATTACAACCAGAAGTTCAAGGACCGCGTGACCATGACTGTGGATAAGTCCAC |
| | | TTCCACCGCTTACATGGAGCTGTCCAGCCTGCGCTCCGAGGATACCGCAGTGTACTACTGC |
| | | GCCCGGGGAAACTGGGACGACTATTGGGGACAGGGAACTACCGTGACCGTGTCAAGCACCA |
| | | CTACCCCAGCACCGAGGCCACCCACCCCGGCTCCTACCATCGCCTCCCAGCCTCTGTCCCT |
| | | GCGTCCGGAggcatgtagacccgcagctggtggggccgtgcatacccggggtcttgacttc |
| | | gcctgcgatatctacatttgggcccctctggctggtacttgcggggtcctgctgctttcac |
| | | tcgtgatcactctttactgtaagcgcggtcggaagaagctgctgtacatctttaagcaacc |
| | | cttcatgaggcctgtgcagactactcaagaggaggacggctgttcatgccggttcccagag |
| | | gaggaggaaggcggctgcgaactgcgcgtgaaattcagccgcagcgcagatgctccagcct |
| | | acaagcaggggcagaaccagctctacaacgaactcaatcttggtcggagagaggagtacga |
| | | cgtgctggacaagcggagaggacgggacccagaaatgggcgggaagccgcgcagaaagaat |
| | | ccccaagagggcctgtacaacgagctccaaaaggataagatggcagaagcctatagcgaga |
| | | ttggtatgaaaggggaacgcagaagaggcaaaggccacgacggactgtaccagggactcag |
| | | caccgccaccaaggacacctatgacgctcttcacatgcaggccctgccgcctcgg |
| hzCAR12 | 2129 | MALPVTALLLPLALLLHAARPDVQLTQSPSFLSASVGDRVTITCRASKSISKDLAWYQQK |
| 3-5 AA | | PGKAPKLLIYSGSTLQSGVPSRFSGSGSGTEFTLTISSLQPEDFATYYCQQHNKYPYTFG |
| | | GGTKVEIKGGGGSGGGGSGGGGSGGGGSQVQLVQSGAEVKKPGASVKVSCKASGYTFTSY |
| | | WMNWVRQAPGQGLEWMGRIDPYDSETHYNQKFKDRVTMTVDKSTSTAYMELSSLRSEDTA |
| | | VYYCARGNWDDYWGQGTTVTVSSTTTPAPRPPTPAPTIASQPLSLRPEACRPAAGGAVHT |
| | | RGLDFACDIYIWAPLAGTCGVLLLSLVITLYCKRGRKKLLYIFKQPFMRPVQTTQEEDGC |
| | | SCRFPEEEEGGCELRVKFSRSADAPAYKQGQNQLYNELNLGRREEYDVLDKRRGRDPEMG |
| | | GKPRRKNPQEGLYNELQKDKMAEAYSEIGMKGERRRGKGHDGLYQGLSTATKDTYDALHM |
| | | QALPPR |
| hzCAR12 | 2188 | MALPVTALLLPLALLLHAARPDVQLTQSPSFLSASVGDRVTITCRASKSISKDLAWYQQK |
| 3-5 | | PGKAPKLLIYSGSTLQSGVPSRFSGSGSGTEFTLTISSLQPEDFATYYCQQHNKYPYTFG |
| scFv | | GGTKVEIKGGGGSGGGGSGGGGSGGGGSQVQLVQSGAEVKKPGASVKVSCKASGYTFTSY |
| | | WMNWVRQAPGQGLEWMGRIDPYDSETHYNQKFKDRVTMTVDKSTSTAYMELSSLRSEDTA |
| | | VYYCARGNWDDYWGQGTTVTVSS |
| hzCAR12 | 2247 | QVQLVQSGAEVKKPGASVKVSCKASGYTFTSYWMNWVRQAPGQGLEWMGRIDPYDSETHYN |
| 3-5 VH | | QKFKDRVTMTVDKSTSTAYMELSSLRSEDTAVYYCARGNWDDYWGQGTTVTVSS |
| hzCAR12 | 2306 | DVQLTQSPSFLSASVGDRVTITCRASKSISKDLAWYQQKPGKAPKLLIYSGSTLQSGVPSR |
| 3-5 VL | | FSGSGSGTEFTLTISSLQPEDFATYYCQQHNKYPYTFGGGTKVEIK |
| hzCAR12 | 2071 | ATGGCCCTCCCTGTCACCGCCCTGCTGCTTCCGCTGGCTCTTCTGCTCCACGCCGCTCGGC |
| 3-6 NT | | CCGAAGTGGTGCTGACCCAGTCGCCCGCAACCCTCTCTCTGTCGCCGGGAGAACGCGCCAC |
| | | TCTTTCCTGTCGGGCGTCCAAGAGCATCTCAAAGGACCTCGCCTGGTACCAGCAGAAGCCT |
| | | GGTCAAGCCCCGCGGCTGCTGATCTACTCCGGCTCCACGCTGCAATCAGGAATCCCAGCCA |
| | | GATTTTCCGGTTCGGGGTCGGGGACTGACTTCACCTTGACCATTAGCTCGCTGGAACCTGA |
| | | GGACTTCGCCGTGTATTACTGCCAGCAGCACAACAAGTACCCGTACACCTTCGGAGGCGGT |
| | | ACTAAGGTCGAGATCAAGGGGGGTGGCGGTAGCGGAGGAGGGGGCTCCGGCGGCGGCGGCT |
| | | CAGGGGGCGGAGGAAGCCAAGTGCAGCTGGTCCAGTCGGGAGCCGAAGTCAAGAAGCCCGG |
| | | CGCTAGCGTGAAAGTGTCCTGCAAAGCCTCCGGGTACACATTCACCTCCTACTGGATGAAT |
| | | TGGGTCAGACAGGCGCCCGGCCAGGGACTCGAGTGGATGGGAAGGATTGATCCTTACGACT |
| | | CCGAAACCCATTACAACCAGAAGTTCAAGGACCGCGTGACCATGACTGTGGATAAGTCCAC |
| | | TTCCACCGCTTACATGGAGCTGTCCAGCCTGCGCTCCGAGGATACCGCAGTGTACTACTGC |
| | | GCCCGGGGAAACTGGGACGACTATTGGGGACAGGGAACTACCGTGACCGTGTCAAGCACCA |
| | | CTACCCCAGCACCGAGGCCACCCACCCCGGCTCCTACCATCGCCTCCCAGCCTCTGTCCCT |
| | | GCGTCCGGAggcatgtagacccgcagctggtggggccgtgcatacccggggtcttgacttc |
| | | gcctgcgatatctacatttgggcccctctggctggtacttgcggggtcctgctgctttcac |
| | | tcgtgatcactctttactgtaagcgcggtcggaagaagctgctgtacatctttaagcaacc |
| | | cttcatgaggcctgtgcagactactcaagaggaggacggctgttcatgccggttcccagag |
| | | gaggaggaaggcggctgcgaactgcgcgtgaaattcagccgcagcgcagatgctccagcct |
| | | acaagcaggggcagaaccagctctacaacgaactcaatcttggtcggagagaggagtacga |
| | | cgtgctggacaagcggagaggacgggacccagaaatgggcgggaagccgcgcagaaagaat |
| | | ccccaagagggcctgtacaacgagctccaaaaggataagatggcagaagcctatagcgaga |
| | | ttggtatgaaaggggaacgcagaagaggcaaaggccacgacggactgtaccagggactcag |
| | | caccgccaccaaggacacctatgacgctcttcacatgcaggccctgccgcctcgg |
| hzCAR12 | 2130 | MALPVTALLLPLALLLHAARPEVVLTQSPATLSLSPGERATLSCRASKSISKDLAWYQQK |
| 3-6 AA | | PGQAPRLLIYSGSTLQSGIPARFSGSGSGTDFTLTISSLEPEDFAVYYCQQHNKYPYTFG |
| | | GGTKVEIKGGGGSGGGGSGGGGSGGGGSQVQLVQSGAEVKKPGASVKVSCKASGYTFTSY |
| | | WMNWVRQAPGQGLEWMGRIDPYDSETHYNQKFKDRVTMTVDKSTSTAYMELSSLRSEDTA |
| | | VYYCARGNWDDYWGQGTTVTVSSTTTPAPRPPTPAPTIASQPLSLRPEACRPAAGGAVHT |
| | | RGLDFACDIYIWAPLAGTCGVLLLSLVITLYCKRGRKKLLYIFKQPFMRPVQTTQEEDGC |
| | | SCRFPEEEEGGCELRVKFSRSADAPAYKQGQNQLYNELNLGRREEYDVLDKRRGRDPEMG |
| | | GKPRRKNPQEGLYNELQKDKMAEAYSEIGMKGERRRGKGHDGLYQGLSTATKDTYDALHM |
| | | QALPPR |
| hzCAR12 | 2189 | MALPVTALLLPLALLLHAARPEVVLTQSPATLSLSPGERATLSCRASKSISKDLAWYQQK |
| 3-6 | | PGQAPRLLIYSGSTLQSGIPARFSGSGSGTDFTLTISSLEPEDFAVYYCQQHNKYPYTFG |
| scFv | | GGTKVEIKGGGGSGGGGSGGGGSGGGGSQVQLVQSGAEVKKPGASVKVSCKASGYTFTSY |
| | | WMNWVRQAPGQGLEWMGRIDPYDSETHYNQKFKDRVTMTVDKSTSTAYMELSSLRSEDTA |
| | | VYYCARGNWDDYWGQGTTVTVSS |
| hzCAR12 | 2248 | QVQLVQSGAEVKKPGASVKVSCKASGYTFTSYWMNWVRQAPGQGLEWMGRIDPYDSETHYN |
| 3-6 VH | | QKFKDRVTMTVDKSTSTAYMELSSLRSEDTAVYYCARGNWDDYWGQGTTVTVSS |
| hzCAR12 | 2307 | EVVLTQSPATLSLSPGERATLSCRASKSISKDLAWYQQKPGQAPRLLIYSGSTLQSGIPAR |
| 3-6 VL | | FSGSGSGTDFTLTISSLEPEDFAVYYCQQHNKYPYTFGGGTKVEIK |
| hzCAR12 | 2072 | ATGGCCCTCCCTGTCACCGCCCTGCTGCTTCCGCTGGCTCTTCTGCTCCACGCCGCTCGGC |
| 3-7 NT | | CCGACGTCGTGATGACCCAGTCACCGGCATTCCTGTCCGTGACTCCCGGAGAAAAGGTCAC |
| | | GATTACTTGCCGGGCGTCCAAGAGCATCTCCAAGGACCTCGCCTGGTACCAACAGAAGCCG |
| | | GACCAGGCCCCTAAGCTGTTGATCTACTCGGGGTCCACCCTTCAATCGGGAGTGCCATCGC |
| | | GGTTTAGCGGTTCGGGTTCTGGGACCGACTTCACTTTCACCATCTCCTCACTGGAAGCCGA |
| | | GGATGCCGCCACTTACTACTGTCAGCAGCACAACAAGTATCCGTACACCTTCGGAGGCGGT |
| | | ACCAAAGTGGAGATCAAGGGGGGTGGCGGTAGCGGAGGAGGGGGCTCCGGCGGCGGCGGCT |
| | | CAGGGGGCGGAGGAAGCCAAGTGCAGCTGGTCCAGTCGGGAGCCGAAGTCAAGAAGCCCGG |
| | | CGCTAGCGTGAAAGTGTCCTGCAAAGCCTCCGGGTACACATTCACCTCCTACTGGATGAAT |
| | | TGGGTCAGACAGGCGCCCGGCCAGGGACTCGAGTGGATGGGAAGGATTGATCCTTACGACT |
| | | CCGAAACCCATTACAACCAGAAGTTCAAGGACCGCGTGACCATGACTGTGGATAAGTCCAC |
| | | TTCCACCGCTTACATGGAGCTGTCCAGCCTGCGCTCCGAGGATACCGCAGTGTACTACTGC |
| | | GCCCGGGGAAACTGGGACGACTATTGGGGACAGGGAACTACCGTGACCGTGTCAAGCACCA |
| | | CTACCCCAGCACCGAGGCCACCCACCCCGGCTCCTACCATCGCCTCCCAGCCTCTGTCCCT |
| | | GCGTCCGGAggcatgtagacccgcagctggtggggccgtgcatacccggggtcttgacttc |
| | | gcctgcgatatctacatttgggcccctctggctggtacttgcggggtcctgctgctttcac |
| | | tcgtgatcactctttactgtaagcgcggtcggaagaagctgctgtacatctttaagcaacc |
| | | cttcatgaggcctgtgcagactactcaagaggaggacggctgttcatgccggttcccagag |
| | | gaggaggaaggcggctgcgaactgcgcgtgaaattcagccgcagcgcagatgctccagcct |
| | | acaagcaggggcagaaccagctctacaacgaactcaatcttggtcggagagaggagtacga |
| | | cgtgctggacaagcggagaggacgggacccagaaatgggcgggaagccgcgcagaaagaat |
| | | ccccaagagggcctgtacaacgagctccaaaaggataagatggcagaagcctatagcgaga |
| | | ttggtatgaaaggggaacgcagaagaggcaaaggccacgacggactgtaccagggactcag |
| | | caccgccaccaaggacacctatgacgctcttcacatgcaggccctgccgcctcgg |
| hzCAR12 | 2131 | MALPVTALLLPLALLLHAARPDVVMTQSPAFLSVTPGEKVTITCRASKSISKDLAWYQQK |
| 3-7 AA | | PDQAPKLLIYSGSTLQSGVPSRFSGSGSGTDFTFTISSLEAEDAATYYCQQHNKYPYTFG |
| | | GGTKVEIKGGGGSGGGGSGGGGSGGGGSQVQLVQSGAEVKKPGASVKVSCKASGYTFTSY |
| | | WMNWVRQAPGQGLEWMGRIDPYDSETHYNQKFKDRVTMTVDKSTSTAYMELSSLRSEDTA |
| | | VYYCARGNWDDYWGQGTTVTVSSTTTPAPRPPTPAPTIASQPLSLRPEACRPAAGGAVHT |
| | | RGLDFACDIYIWAPLAGTCGVLLLSLVITLYCKRGRKKLLYIFKQPFMRPVQTTQEEDGC |
| | | SCRFPEEEEGGCELRVKFSRSADAPAYKQGQNQLYNELNLGRREEYDVLDKRRGRDPEMG |
| | | GKPRRKNPQEGLYNELQKDKMAEAYSEIGMKGERRRGKGHDGLYQGLSTATKDTYDALHM |
| | | QALPPR |
| hzCAR12 | 2190 | MALPVTALLLPLALLLHAARPDVVMTQSPAFLSVTPGEKVTITCRASKSISKDLAWYQQK |
| 3-7 | | PDQAPKLLIYSGSTLQSGVPSRFSGSGSGTDFTFTISSLEAEDAATYYCQQHNKYPYTFG |
| scFv | | GGTKVEIKGGGGSGGGGSGGGGSGGGGSQVQLVQSGAEVKKPGASVKVSCKASGYTFTSY |
| | | WMNWVRQAPGQGLEWMGRIDPYDSETHYNQKFKDRVTMTVDKSTSTAYMELSSLRSEDTA |
| | | VYYCARGNWDDYWGQGTTVTVSS |
| hzCAR12 | 2249 | QVQLVQSGAEVKKPGASVKVSCKASGYTFTSYWMNWVRQAPGQGLEWMGRIDPYDSETHYN |
| 3-7 VH | | QKFKDRVTMTVDKSTSTAYMELSSLRSEDTAVYYCARGNWDDYWGQGTTVTVSS |
| hzCAR12 | 2308 | DVVMTQSPAFLSVTPGEKVTITCRASKSISKDLAWYQQKPDQAPKLLIYSGSTLQSGVPSR |
| 3-7 VL | | FSGSGSGTDFTFTISSLEAEDAATYYCQQHNKYPYTFGGGTKVEIK |
| hzCAR12 | 2073 | ATGGCCCTCCCTGTCACCGCCCTGCTGCTTCCGCTGGCTCTTCTGCTCCACGCCGCTCGGC |
| 3-8 NT | | CCGACGTGGTCATGACTCAGTCCCCGGACTCACTCGCGGTGTCGCTTGGAGAGAGAGCGAC |
| | | CATCAACTGTCGGGCCTCAAAGAGCATCAGCAAGGACCTGGCCTGGTACCAGCAGAAGCCG |
| | | GGACAGCCGCCAAAGCTGCTGATCTACTCCGGGTCCACCTTGCAATCTGGTGTCCCTGACC |
| | | GGTTCTCCGGTTCCGGGTCGGGTACCGACTTCACGCTCACTATTTCGTCGCTGCAAGCCGA |
| | | AGATGTGGCCGTGTACTATTGCCAACAGCACAACAAGTACCCCTACACTTTTGGCGGAGGC |
| | | ACCAAGGTGGAAATCAAGGGGGGTGGCGGTAGCGGAGGAGGGGGCTCCGGCGGCGGCGGCT |
| | | CAGGGGGCGGAGGAAGCCAAGTGCAGCTGGTCCAGTCGGGAGCCGAAGTCAAGAAGCCCGG |
| | | CGCTAGCGTGAAAGTGTCCTGCAAAGCCTCCGGGTACACATTCACCTCCTACTGGATGAAT |
| | | TGGGTCAGACAGGCGCCCGGCCAGGGACTCGAGTGGATGGGAAGGATTGATCCTTACGACT |
| | | CCGAAACCCATTACAACCAGAAGTTCAAGGACCGCGTGACCATGACTGTGGATAAGTCCAC |
| | | TTCCACCGCTTACATGGAGCTGTCCAGCCTGCGCTCCGAGGATACCGCAGTGTACTACTGC |
| | | GCCCGGGGAAACTGGGACGACTATTGGGGACAGGGAACTACCGTGACCGTGTCAAGCACCA |
| | | CTACCCCAGCACCGAGGCCACCCACCCCGGCTCCTACCATCGCCTCCCAGCCTCTGTCCCT |
| | | GCGTCCGGAggcatgtagacccgcagctggtggggccgtgcatacccggggtcttgacttc |
| | | gcctgcgatatctacatttgggcccctctggctggtacttgcggggtcctgctgctttcac |
| | | tcgtgatcactctttactgtaagcgcggtcggaagaagctgctgtacatctttaagcaacc |
| | | cttcatgaggcctgtgcagactactcaagaggaggacggctgttcatgccggttcccagag |
| | | gaggaggaaggcggctgcgaactgcgcgtgaaattcagccgcagcgcagatgctccagcct |
| | | acaagcaggggcagaaccagctctacaacgaactcaatcttggtcggagagaggagtacga |
| | | cgtgctggacaagcggagaggacgggacccagaaatgggcgggaagccgcgcagaaagaat |
| | | ccccaagagggcctgtacaacgagctccaaaaggataagatggcagaagcctatagcgaga |
| | | ttggtatgaaaggggaacgcagaagaggcaaaggccacgacggactgtaccagggactcag |
| | | caccgccaccaaggacacctatgacgctcttcacatgcaggccctgccgcctcgg |
| hzCAR12 | 2132 | MALPVTALLLPLALLLHAARPDVVMTQSPDSLAVSLGERATINCRASKSISKDLAWYQQK |
| 3-8 AA | | PGQPPKLLIYSGSTLQSGVPDRFSGSGSGTDFTLTISSLQAEDVAVYYCQQHNKYPYTFG |
| | | GGTKVEIKGGGGSGGGGSGGGGSGGGGSQVQLVQSGAEVKKPGASVKVSCKASGYTFTSY |
| | | WMNWVRQAPGQGLEWMGRIDPYDSETHYNQKFKDRVTMTVDKSTSTAYMELSSLRSEDTA |
| | | VYYCARGNWDDYWGQGTTVTVSSTTTPAPRPPTPAPTIASQPLSLRPEACRPAAGGAVHT |
| | | RGLDFACDIYIWAPLAGTCGVLLLSLVITLYCKRGRKKLLYIFKQPFMRPVQTTQEEDGC |
| | | SCRFPEEEEGGCELRVKFSRSADAPAYKQGQNQLYNELNLGRREEYDVLDKRRGRDPEMG |
| | | GKPRRKNPQEGLYNELQKDKMAEAYSEIGMKGERRRGKGHDGLYQGLSTATKDTYDALHM |
| | | QALPPR |
| hzCAR12 | 2191 | MALPVTALLLPLALLLHAARPDVVMTQSPDSLAVSLGERATINCRASKSISKDLAWYQQK |
| 3-8 | | PGQPPKLLIYSGSTLQSGVPDRFSGSGSGTDFTLTISSLQAEDVAVYYCQQHNKYPYTFG |
| scFv | | GGTKVEIKGGGGSGGGGSGGGGSGGGGSQVQLVQSGAEVKKPGASVKVSCKASGYTFTSY |
| | | WMNWVRQAPGQGLEWMGRIDPYDSETHYNQKFKDRVTMTVDKSTSTAYMELSSLRSEDTA |
| | | VYYCARGNWDDYWGQGTTVTVSS |
| hzCAR12 | 2250 | QVQLVQSGAEVKKPGASVKVSCKASGYTFTSYWMNWVRQAPGQGLEWMGRIDPYDSETHYN |
| 3-8 VH | | QKFKDRVTMTVDKSTSTAYMELSSLRSEDTAVYYCARGNWDDYWGQGTTVTVSS |
| hzCAR12 | 2309 | DVVMTQSPDSLAVSLGERATINCRASKSISKDLAWYQQKPGQPPKLLIYSGSTLQSGVPDR |
| 3-8 VL | | FSGSGSGTDFTLTISSLQAEDVAVYYCQQHNKYPYTFGGGTKVEIK |
| hzCAR12 | 2074 | ATGGCCCTCCCTGTCACCGCCCTGCTGCTTCCGCTGGCTCTTCTGCTCCACGCCGCTCGGC |
| 3-9 NT | | CCCAAGTGCAGCTGGTGCAGTCAGGCAGCGAACTGAAGAAGCCCGGAGCCTCCGTCAAAGT |
| | | GTCCTGCAAAGCCTCGGGATACACCTTCACCTCCTACTGGATGAACTGGGTCCGCCAGGCA |
| | | CCTGGACAGGGGCTGGAGTGGATGGGAAGGATCGATCCCTACGATTCCGAAACCCATTACA |
| | | ATCAGAAGTTCAAGGACCGGTTTGTGTTCTCCGTGGACAAGTCCGTGTCCACCGCCTACCT |
| | | CCAAATTAGCAGCCTGAAGGCGGAGGATACAGCTGTCTACTACTGCGCTCGCGGAAACTGG |
| | | GATGACTATTGGGGCCAGGGAACTACCGTGACTGTGTCCTCCGGGGGTGGCGGTAGCGGAG |
| | | GAGGGGGCTCCGGCGGCGGCGGCTCAGGGGGCGGAGGAAGCGACGTGCAGCTCACCCAGTC |
| | | GCCCTCATTTCTGTCGGCCTCAGTGGGAGACAGAGTGACCATTACTTGTCGGGCCTCCAAG |
| | | AGCATCTCCAAGGACCTGGCCTGGTATCAGCAGAAGCCAGGAAAGGCGCCTAAGTTGCTCA |
| | | TCTACTCGGGGTCGACCCTGCAATCTGGCGTGCCGTCCCGGTTCTCCGGTTCGGGAAGCGG |
| | | TACCGAATTCACCCTTACTATCTCCTCCCTGCAACCGGAGGACTTCGCCACCTACTACTGC |
| | | CAACAGCACAACAAGTACCCGTACACTTTCGGGGGTGGCACGAAGGTCGAAATCAAGACCA |
| | | CTACCCCAGCACCGAGGCCACCCACCCCGGCTCCTACCATCGCCTCCCAGCCTCTGTCCCT |
| | | GCGTCCGGAggcatgtagacccgcagctggtggggccgtgcatacccggggtcttgacttc |
| | | gcctgcgatatctacatttgggcccctctggctggtacttgcggggtcctgctgctttcac |
| | | tcgtgatcactctttactgtaagcgcggtcggaagaagctgctgtacatctttaagcaacc |
| | | cttcatgaggcctgtgcagactactcaagaggaggacggctgttcatgccggttcccagag |
| | | gaggaggaaggcggctgcgaactgcgcgtgaaattcagccgcagcgcagatgctccagcct |
| | | acaagcaggggcagaaccagctctacaacgaactcaatcttggtcggagagaggagtacga |
| | | cgtgctggacaagcggagaggacgggacccagaaatgggcgggaagccgcgcagaaagaat |
| | | ccccaagagggcctgtacaacgagctccaaaaggataagatggcagaagcctatagcgaga |
| | | ttggtatgaaaggggaacgcagaagaggcaaaggccacgacggactgtaccagggactcag |
| | | caccgccaccaaggacacctatgacgctcttcacatgcaggccctgccgcctcgg |
| hzCAR12 | 2133 | MALPVTALLLPLALLLHAARPQVQLVQSGSELKKPGASVKVSCKASGYTFTSYWMNWVRQ |
| 3-9 AA | | APGQGLEWMGRIDPYDSETHYNQKFKDRFVFSVDKSVSTAYLQISSLKAEDTAVYYCARG |
| | | NWDDYWGQGTTVTVSSGGGGSGGGGSGGGGSGGGGSDVQLTQSPSFLSASVGDRVTITCR |
| | | ASKSISKDLAWYQQKPGKAPKLLIYSGSTLQSGVPSRFSGSGSGTEFTLTISSLQPEDFA |
| | | TYYCQQHNKYPYTFGGGTKVEIKTTTPAPRPPTPAPTIASQPLSLRPEACRPAAGGAVHT |
| | | RGLDFACDIYIWAPLAGTCGVLLLSLVITLYCKRGRKKLLYIFKQPFMRPVQTTQEEDGC |
| | | SCRFPEEEEGGCELRVKFSRSADAPAYKQGQNQLYNELNLGRREEYDVLDKRRGRDPEMG |
| | | GKPRRKNPQEGLYNELQKDKMAEAYSEIGMKGERRRGKGHDGLYQGLSTATKDTYDALHM |
| | | QALPPR |
| hzCAR12 | 2192 | MALPVTALLLPLALLLHAARPQVQLVQSGSELKKPGASVKVSCKASGYTFTSYWMNWVRQ |
| 3-9 | | APGQGLEWMGRIDPYDSETHYNQKFKDRFVFSVDKSVSTAYLQISSLKAEDTAVYYCARG |
| scFv | | NWDDYWGQGTTVTVSSGGGGSGGGGSGGGGSGGGGSDVQLTQSPSFLSASVGDRVTITCR |
| | | ASKSISKDLAWYQQKPGKAPKLLIYSGSTLQSGVPSRFSGSGSGTEFTLTISSLQPEDFA |
| | | TYYCQQHNKYPYTFGGGTKVEIK |
| hzCAR12 | 2251 | QVQLVQSGSELKKPGASVKVSCKASGYTFTSYWMNWVRQAPGQGLEWMGRIDPYDSETHYN |
| 3-9 VH | | QKFKDRFVFSVDKSVSTAYLQISSLKAEDTAVYYCARGNWDDYWGQGTTVTVSS |
| hzCAR12 | 2310 | DVQLTQSPSFLSASVGDRVTITCRASKSISKDLAWYQQKPGKAPKLLIYSGSTLQSGVPSR |
| 3-10 VL | | FSGSGSGTEFTLTISSLQPEDFATYYCQQHNKYPYTFGGGTKVEIK |
| hzCAR12 | 2075 | ATGGCCCTCCCTGTCACCGCCCTGCTGCTTCCGCTGGCTCTTCTGCTCCACGCCGCTCGGC |
| 3-10 NT | | CCCAAGTGCAGCTGGTGCAGTCAGGCAGCGAACTGAAGAAGCCCGGAGCCTCCGTCAAAGT |
| | | GTCCTGCAAAGCCTCGGGATACACCTTCACCTCCTACTGGATGAACTGGGTCCGCCAGGCA |
| | | CCTGGACAGGGGCTGGAGTGGATGGGAAGGATCGATCCCTACGATTCCGAAACCCATTACA |
| | | ATCAGAAGTTCAAGGACCGGTTTGTGTTCTCCGTGGACAAGTCCGTGTCCACCGCCTACCT |
| | | CCAAATTAGCAGCCTGAAGGCGGAGGATACAGCTGTCTACTACTGCGCTCGCGGAAACTGG |
| | | GATGACTATTGGGGCCAGGGAACTACCGTGACTGTGTCCTCCGGGGGTGGCGGTAGCGGAG |
| | | GAGGGGGCTCCGGCGGCGGCGGCTCAGGGGGCGGAGGAAGCGAAGTGGTGCTGACCCAGTC |
| | | GCCCGCAACCCTCTCTCTGTCGCCGGGAGAACGCGCCACTCTTTCCTGTCGGGCGTCCAAG |
| | | AGCATCTCAAAGGACCTCGCCTGGTACCAGCAGAAGCCTGGTCAAGCCCCGCGGCTGCTGA |
| | | TCTACTCCGGCTCCACGCTGCAATCAGGAATCCCAGCCAGATTTTCCGGTTCGGGGTCGGG |
| | | GACTGACTTCACCTTGACCATTAGCTCGCTGGAACCTGAGGACTTCGCCGTGTATTACTGC |
| | | CAGCAGCACAACAAGTACCCGTACACCTTCGGAGGCGGTACTAAGGTCGAGATCAAGACCA |
| | | CTACCCCAGCACCGAGGCCACCCACCCCGGCTCCTACCATCGCCTCCCAGCCTCTGTCCCT |
| | | GCGTCCGGAggcatgtagacccgcagctggtggggccgtgcatacccggggtcttgacttc |
| | | gcctgcgatatctacatttgggcccctctggctggtacttgcggggtcctgctgctttcac |
| | | tcgtgatcactctttactgtaagcgcggtcggaagaagctgctgtacatctttaagcaacc |
| | | cttcatgaggcctgtgcagactactcaagaggaggacggctgttcatgccggttcccagag |
| | | gaggaggaaggcggctgcgaactgcgcgtgaaattcagccgcagcgcagatgctccagcct |
| | | acaagcaggggcagaaccagctctacaacgaactcaatcttggtcggagagaggagtacga |
| | | cgtgctggacaagcggagaggacgggacccagaaatgggcgggaagccgcgcagaaagaat |
| | | ccccaagagggcctgtacaacgagctccaaaaggataagatggcagaagcctatagcgaga |
| | | ttggtatgaaaggggaacgcagaagaggcaaaggccacgacggactgtaccagggactcag |
| | | caccgccaccaaggacacctatgacgctcttcacatgcaggccctgccgcctcgg |
| hzCAR12 | 2134 | MALPVTALLLPLALLLHAARPQVQLVQSGSELKKPGASVKVSCKASGYTFTSYWMNWVRQ |
| 3-10 AA | | APGQGLEWMGRIDPYDSETHYNQKFKDRFVFSVDKSVSTAYLQISSLKAEDTAVYYCARG |
| | | NWDDYWGQGTTVTVSSGGGGSGGGGSGGGGSGGGGSEVVLTQSPATLSLSPGERATLSCR |
| | | ASKSISKDLAWYQQKPGQAPRLLIYSGSTLQSGIPARFSGSGSGTDFTLTISSLEPEDFA |
| | | VYYCQQHNKYPYTFGGGTKVEIKTTTPAPRPPTPAPTIASQPLSLRPEACRPAAGGAVHT |
| | | RGLDFACDIYIWAPLAGTCGVLLLSLVITLYCKRGRKKLLYIFKQPFMRPVQTTQEEDGC |
| | | SCRFPEEEEGGCELRVKFSRSADAPAYKQGQNQLYNELNLGRREEYDVLDKRRGRDPEMG |
| | | GKPRRKNPQEGLYNELQKDKMAEAYSEIGMKGERRRGKGHDGLYQGLSTATKDTYDALHM |
| | | QALPPR |
| hzCAR12 | 2193 | MALPVTALLLPLALLLHAARPQVQLVQSGSELKKPGASVKVSCKASGYTFTSYWMNWVRQ |
| 3-10 | | APGQGLEWMGRIDPYDSETHYNQKFKDRFVFSVDKSVSTAYLQISSLKAEDTAVYYCARG |
| scFv | | NWDDYWGQGTTVTVSSGGGGSGGGGSGGGGSGGGGSEVVLTQSPATLSLSPGERATLSCR |
| | | ASKSISKDLAWYQQKPGQAPRLLIYSGSTLQSGIPARFSGSGSGTDFTLTISSLEPEDFA |
| | | VYYCQQHNKYPYTFGGGTKVEIK |
| hzCAR12 | 2252 | QVQLVQSGSELKKPGASVKVSCKASGYTFTSYWMNWVRQAPGQGLEWMGRIDPYDSETHYN |
| 3-10 VH | | QKFKDRFVFSVDKSVSTAYLQISSLKAEDTAVYYCARGNWDDYWGQGTTVTVSS |
| hzCAR12 | 2311 | EVVLTQSPATLSLSPGERATLSCRASKSISKDLAWYQQKPGQAPRLLIYSGSTLQSGIPAR |
| 3-10 VL | | FSGSGSGTDFTLTISSLEPEDFAVYYCQQHNKYPYTFGGGTKVEIK |
| hzCAR12 | 2076 | ATGGCCCTCCCTGTCACCGCCCTGCTGCTTCCGCTGGCTCTTCTGCTCCACGCCGCTCGGC |
| 3-11 NT | | CCCAAGTGCAGCTGGTGCAGTCAGGCAGCGAACTGAAGAAGCCCGGAGCCTCCGTCAAAGT |
| | | GTCCTGCAAAGCCTCGGGATACACCTTCACCTCCTACTGGATGAACTGGGTCCGCCAGGCA |
| | | CCTGGACAGGGGCTGGAGTGGATGGGAAGGATCGATCCCTACGATTCCGAAACCCATTACA |
| | | ATCAGAAGTTCAAGGACCGGTTTGTGTTCTCCGTGGACAAGTCCGTGTCCACCGCCTACCT |
| | | CCAAATTAGCAGCCTGAAGGCGGAGGATACAGCTGTCTACTACTGCGCTCGCGGAAACTGG |
| | | GATGACTATTGGGGCCAGGGAACTACCGTGACTGTGTCCTCCGGGGGTGGCGGTAGCGGAG |
| | | GAGGGGGCTCCGGCGGCGGCGGCTCAGGGGGCGGAGGAAGCGACGTCGTGATGACCCAGTC |
| | | ACCGGCATTCCTGTCCGTGACTCCCGGAGAAAAGGTCACGATTACTTGCCGGGCGTCCAAG |
| | | AGCATCTCCAAGGACCTCGCCTGGTACCAACAGAAGCCGGACCAGGCCCCTAAGCTGTTGA |
| | | TCTACTCGGGGTCCACCCTTCAATCGGGAGTGCCATCGCGGTTTAGCGGTTCGGGTTCTGG |
| | | GACCGACTTCACTTTCACCATCTCCTCACTGGAAGCCGAGGATGCCGCCACTTACTACTGT |
| | | CAGCAGCACAACAAGTATCCGTACACCTTCGGAGGCGGTACCAAAGTGGAGATCAAGACCA |
| | | CTACCCCAGCACCGAGGCCACCCACCCCGGCTCCTACCATCGCCTCCCAGCCTCTGTCCCT |
| | | GCGTCCGGAggcatgtagacccgcagctggtggggccgtgcatacccggggtcttgacttc |
| | | gcctgcgatatctacatttgggcccctctggctggtacttgcggggtcctgctgctttcac |
| | | tcgtgatcactctttactgtaagcgcggtcggaagaagctgctgtacatctttaagcaacc |
| | | cttcatgaggcctgtgcagactactcaagaggaggacggctgttcatgccggttcccagag |
| | | gaggaggaaggcggctgcgaactgcgcgtgaaattcagccgcagcgcagatgctccagcct |
| | | acaagcaggggcagaaccagctctacaacgaactcaatcttggtcggagagaggagtacga |
| | | cgtgctggacaagcggagaggacgggacccagaaatgggcgggaagccgcgcagaaagaat |
| | | ccccaagagggcctgtacaacgagctccaaaaggataagatggcagaagcctatagcgaga |
| | | ttggtatgaaaggggaacgcagaagaggcaaaggccacgacggactgtaccagggactcag |
| | | caccgccaccaaggacacctatgacgctcttcacatgcaggccctgccgcctcgg |
| hzCAR12 | 2135 | MALPVTALLLPLALLLHAARPQVQLVQSGSELKKPGASVKVSCKASGYTFTSYWMNWVRQ |
| 3-11 AA | | APGQGLEWMGRIDPYDSETHYNQKFKDRFVFSVDKSVSTAYLQISSLKAEDTAVYYCARG |
| | | NWDDYWGQGTTVTVSSGGGGSGGGGSGGGGSGGGGSDVVMTQSPAFLSVTPGEKVTITCR |
| | | ASKSISKDLAWYQQKPDQAPKLLIYSGSTLQSGVPSRFSGSGSGTDFTFTISSLEAEDAA |
| | | TYYCQQHNKYPYTFGGGTKVEIKTTTPAPRPPTPAPTIASQPLSLRPEACRPAAGGAVHT |
| | | RGLDFACDIYIWAPLAGTCGVLLLSLVITLYCKRGRKKLLYIFKQPFMRPVQTTQEEDGC |
| | | SCRFPEEEEGGCELRVKFSRSADAPAYKQGQNQLYNELNLGRREEYDVLDKRRGRDPEMG |
| | | GKPRRKNPQEGLYNELQKDKMAEAYSEIGMKGERRRGKGHDGLYQGLSTATKDTYDALHM |
| | | QALPPR |
| hzCAR12 | 2194 | MALPVTALLLPLALLLHAARPQVQLVQSGSELKKPGASVKVSCKASGYTFTSYWMNWVRQ |
| 3-11 | | APGQGLEWMGRIDPYDSETHYNQKFKDRFVFSVDKSVSTAYLQISSLKAEDTAVYYCARG |
| scFv | | NWDDYWGQGTTVTVSSGGGGSGGGGSGGGGSGGGGSDVVMTQSPAFLSVTPGEKVTITCR |
| | | ASKSISKDLAWYQQKPDQAPKLLIYSGSTLQSGVPSRFSGSGSGTDFTFTISSLEAEDAA |
| | | TYYCQQHNKYPYTFGGGTKVEIK |
| hzCAR12 | 2253 | QVQLVQSGSELKKPGASVKVSCKASGYTFTSYWMNWVRQAPGQGLEWMGRIDPYDSETHYN |
| 3-11 VH | | QKFKDRFVFSVDKSVSTAYLQISSLKAEDTAVYYCARGNWDDYWGQGTTVTVSS |
| hzCAR12 | 2312 | DVVMTQSPAFLSVTPGEKVTITCRASKSISKDLAWYQQKPDQAPKLLIYSGSTLQSGVPSR |
| 3-11 VL | | FSGSGSGTDFTFTISSLEAEDAATYYCQQHNKYPYTFGGGTKVEIK |
| hzCAR12 | 2077 | ATGGCCCTCCCTGTCACCGCCCTGCTGCTTCCGCTGGCTCTTCTGCTCCACGCCGCTCGGC |
| 3-12 NT | | CCCAAGTGCAGCTGGTGCAGTCAGGCAGCGAACTGAAGAAGCCCGGAGCCTCCGTCAAAGT |
| | | GTCCTGCAAAGCCTCGGGATACACCTTCACCTCCTACTGGATGAACTGGGTCCGCCAGGCA |
| | | CCTGGACAGGGGCTGGAGTGGATGGGAAGGATCGATCCCTACGATTCCGAAACCCATTACA |
| | | ATCAGAAGTTCAAGGACCGGTTTGTGTTCTCCGTGGACAAGTCCGTGTCCACCGCCTACCT |
| | | CCAAATTAGCAGCCTGAAGGCGGAGGATACAGCTGTCTACTACTGCGCTCGCGGAAACTGG |
| | | GATGACTATTGGGGCCAGGGAACTACCGTGACTGTGTCCTCCGGGGGTGGCGGTAGCGGAG |
| | | GAGGGGGCTCCGGCGGCGGCGGCTCAGGGGGCGGAGGAAGCGACGTGGTCATGACTCAGTC |
| | | CCCGGACTCACTCGCGGTGTCGCTTGGAGAGAGAGCGACCATCAACTGTCGGGCCTCAAAG |
| | | AGCATCAGCAAGGACCTGGCCTGGTACCAGCAGAAGCCGGGACAGCCGCCAAAGCTGCTGA |
| | | TCTACTCCGGGTCCACCTTGCAATCTGGTGTCCCTGACCGGTTCTCCGGTTCCGGGTCGGG |
| | | TACCGACTTCACGCTCACTATTTCGTCGCTGCAAGCCGAAGATGTGGCCGTGTACTATTGC |
| | | CAACAGCACAACAAGTACCCCTACACTTTTGGCGGAGGCACCAAGGTGGAAATCAAGACCA |
| | | CTACCCCAGCACCGAGGCCACCCACCCCGGCTCCTACCATCGCCTCCCAGCCTCTGTCCCT |
| | | GCGTCCGGAggcatgtagacccgcagctggtggggccgtgcatacccggggtcttgacttc |
| | | gcctgcgatatctacatttgggcccctctggctggtacttgcggggtcctgctgctttcac |
| | | tcgtgatcactctttactgtaagcgcggtcggaagaagctgctgtacatctttaagcaacc |
| | | cttcatgaggcctgtgcagactactcaagaggaggacggctgttcatgccggttcccagag |
| | | gaggaggaaggcggctgcgaactgcgcgtgaaattcagccgcagcgcagatgctccagcct |
| | | acaagcaggggcagaaccagctctacaacgaactcaatcttggtcggagagaggagtacga |
| | | cgtgctggacaagcggagaggacgggacccagaaatgggcgggaagccgcgcagaaagaat |
| | | ccccaagagggcctgtacaacgagctccaaaaggataagatggcagaagcctatagcgaga |
| | | ttggtatgaaaggggaacgcagaagaggcaaaggccacgacggactgtaccagggactcag |
| | | caccgccaccaaggacacctatgacgctcttcacatgcaggccctgccgcctcgg |
| hzCAR12 | 2136 | MALPVTALLLPLALLLHAARPQVQLVQSGSELKKPGASVKVSCKASGYTFTSYWMNWVRQ |
| 3-12 AA | | APGQGLEWMGRIDPYDSETHYNQKFKDRFVFSVDKSVSTAYLQISSLKAEDTAVYYCARG |
| | | NWDDYWGQGTTVTVSSGGGGSGGGGSGGGGSGGGGSDVVMTQSPDSLAVSLGERATINCR |
| | | ASKSISKDLAWYQQKPGQPPKLLIYSGSTLQSGVPDRFSGSGSGTDFTLTISSLQAEDVA |
| | | VYYCQQHNKYPYTFGGGTKVEIKTTTPAPRPPTPAPTIASQPLSLRPEACRPAAGGAVHT |
| | | RGLDFACDIYIWAPLAGTCGVLLLSLVITLYCKRGRKKLLYIFKQPFMRPVQTTQEEDGC |
| | | SCRFPEEEEGGCELRVKFSRSADAPAYKQGQNQLYNELNLGRREEYDVLDKRRGRDPEMG |
| | | GKPRRKNPQEGLYNELQKDKMAEAYSEIGMKGERRRGKGHDGLYQGLSTATKDTYDALHM |
| | | QALPPR |
| hzCAR12 | 2195 | MALPVTALLLPLALLLHAARPQVQLVQSGSELKKPGASVKVSCKASGYTFTSYWMNWVRQ |
| 3-12 | | APGQGLEWMGRIDPYDSETHYNQKFKDRFVFSVDKSVSTAYLQISSLKAEDTAVYYCARG |
| scFv | | NWDDYWGQGTTVTVSSGGGGSGGGGSGGGGSGGGGSDVVMTQSPDSLAVSLGERATINCR |
| | | ASKSISKDLAWYQQKPGQPPKLLIYSGSTLQSGVPDRFSGSGSGTDFTLTISSLQAEDVA |
| | | VYYCQQHNKYPYTFGGGTKVEIK |
| hzCAR12 | 2254 | QVQLVQSGSELKKPGASVKVSCKASGYTFTSYWMNWVRQAPGQGLEWMGRIDPYDSETHYN |
| 3-12 VH | | QKFKDRFVFSVDKSVSTAYLQISSLKAEDTAVYYCARGNWDDYWGQGTTVTVSS |
| hzCAR12 | 2313 | DVVMTQSPDSLAVSLGERATINCRASKSISKDLAWYQQKPGQPPKLLIYSGSTLQSGVPDR |
| 3-12 VL | | FSGSGSGTDFTLTISSLQAEDVAVYYCQQHNKYPYTFGGGTKVEIK |
| hzCAR12 | 2078 | ATGGCCCTCCCTGTCACCGCCCTGCTGCTTCCGCTGGCTCTTCTGCTCCACGCCGCTCGGC |
| 3-13 NT | | CCGACGTGCAGCTCACCCAGTCGCCCTCATTTCTGTCGGCCTCAGTGGGAGACAGAGTGAC |
| | | CATTACTTGTCGGGCCTCCAAGAGCATCTCCAAGGACCTGGCCTGGTATCAGCAGAAGCCA |
| | | GGAAAGGCGCCTAAGTTGCTCATCTACTCGGGGTCGACCCTGCAATCTGGCGTGCCGTCCC |
| | | GGTTCTCCGGTTCGGGAAGCGGTACCGAATTCACCCTTACTATCTCCTCCCTGCAACCGGA |
| | | GGACTTCGCCACCTACTACTGCCAACAGCACAACAAGTACCCGTACACTTTCGGGGGTGGC |
| | | ACGAAGGTCGAAATCAAGGGGGGTGGCGGTAGCGGAGGAGGGGGCTCCGGCGGCGGCGGCT |
| | | CAGGGGGCGGAGGAAGCCAAGTGCAGCTGGTGCAGTCAGGCAGCGAACTGAAGAAGCCCGG |
| | | AGCCTCCGTCAAAGTGTCCTGCAAAGCCTCGGGATACACCTTCACCTCCTACTGGATGAAC |
| | | TGGGTCCGCCAGGCACCTGGACAGGGGCTGGAGTGGATGGGAAGGATCGATCCCTACGATT |
| | | CCGAAACCCATTACAATCAGAAGTTCAAGGACCGGTTTGTGTTCTCCGTGGACAAGTCCGT |
| | | GTCCACCGCCTACCTCCAAATTAGCAGCCTGAAGGCGGAGGATACAGCTGTCTACTACTGC |
| | | GCTCGCGGAAACTGGGATGACTATTGGGGCCAGGGAACTACCGTGACTGTGTCCTCCACCA |
| | | CTACCCCAGCACCGAGGCCACCCACCCCGGCTCCTACCATCGCCTCCCAGCCTCTGTCCCT |
| | | GCGTCCGGAggcatgtagacccgcagctggtggggccgtgcatacccggggtcttgacttc |
| | | gcctgcgatatctacatttgggcccctctggctggtacttgcggggtcctgctgctttcac |
| | | tcgtgatcactctttactgtaagcgcggtcggaagaagctgctgtacatctttaagcaacc |
| | | cttcatgaggcctgtgcagactactcaagaggaggacggctgttcatgccggttcccagag |
| | | gaggaggaaggcggctgcgaactgcgcgtgaaattcagccgcagcgcagatgctccagcct |
| | | acaagcaggggcagaaccagctctacaacgaactcaatcttggtcggagagaggagtacga |
| | | cgtgctggacaagcggagaggacgggacccagaaatgggcgggaagccgcgcagaaagaat |
| | | ccccaagagggcctgtacaacgagctccaaaaggataagatggcagaagcctatagcgaga |
| | | ttggtatgaaaggggaacgcagaagaggcaaaggccacgacggactgtaccagggactcag |
| | | caccgccaccaaggacacctatgacgctcttcacatgcaggccctgccgcctcgg |
| hzCAR12 | 2137 | MALPVTALLLPLALLLHAARPDVQLTQSPSFLSASVGDRVTITCRASKSISKDLAWYQQK |
| 3-13 AA | | PGKAPKLLIYSGSTLQSGVPSRFSGSGSGTEFTLTISSLQPEDFATYYCQQHNKYPYTFG |
| | | GGTKVEIKGGGGSGGGGSGGGGSGGGGSQVQLVQSGSELKKPGASVKVSCKASGYTFTSY |
| | | WMNWVRQAPGQGLEWMGRIDPYDSETHYNQKFKDRFVFSVDKSVSTAYLQISSLKAEDTA |
| | | VYYCARGNWDDYWGQGTTVTVSSTTTPAPRPPTPAPTIASQPLSLRPEACRPAAGGAVHT |
| | | RGLDFACDIYIWAPLAGTCGVLLLSLVITLYCKRGRKKLLYIFKQPFMRPVQTTQEEDGC |
| | | SCRFPEEEEGGCELRVKFSRSADAPAYKQGQNQLYNELNLGRREEYDVLDKRRGRDPEMG |
| | | GKPRRKNPQEGLYNELQKDKMAEAYSEIGMKGERRRGKGHDGLYQGLSTATKDTYDALHM |
| | | QALPPR |
| hzCAR12 | 2196 | MALPVTALLLPLALLLHAARPDVQLTQSPSFLSASVGDRVTITCRASKSISKDLAWYQQK |
| 3-13 | | PGKAPKLLIYSGSTLQSGVPSRFSGSGSGTEFTLTISSLQPEDFATYYCQQHNKYPYTFG |
| scFv | | GGTKVEIKGGGGSGGGGSGGGGSGGGGSQVQLVQSGSELKKPGASVKVSCKASGYTFTSY |
| | | WMNWVRQAPGQGLEWMGRIDPYDSETHYNQKFKDRFVFSVDKSVSTAYLQISSLKAEDTA |
| | | VYYCARGNWDDYWGQGTTVTVSS |
| hzCAR12 | 2255 | QVQLVQSGSELKKPGASVKVSCKASGYTFTSYWMNWVRQAPGQGLEWMGRIDPYDSETHYN |
| 3-13 VH | | QKFKDRFVFSVDKSVSTAYLQISSLKAEDTAVYYCARGNWDDYWGQGTTVTVSS |
| hzCAR12 | 2314 | DVQLTQSPSFLSASVGDRVTITCRASKSISKDLAWYQQKPGKAPKLLIYSGSTLQSGVPSR |
| 3-13 VL | | FSGSGSGTEFTLTISSLQPEDFATYYCQQHNKYPYTFGGGTKVEIK |
| hzCAR12 | 2079 | ATGGCCCTCCCTGTCACCGCCCTGCTGCTTCCGCTGGCTCTTCTGCTCCACGCCGCTCGGC |
| 3-14 NT | | CCGAAGTGGTGCTGACCCAGTCGCCCGCAACCCTCTCTCTGTCGCCGGGAGAACGCGCCAC |
| | | TCTTTCCTGTCGGGCGTCCAAGAGCATCTCAAAGGACCTCGCCTGGTACCAGCAGAAGCCT |
| | | GGTCAAGCCCCGCGGCTGCTGATCTACTCCGGCTCCACGCTGCAATCAGGAATCCCAGCCA |
| | | GATTTTCCGGTTCGGGGTCGGGGACTGACTTCACCTTGACCATTAGCTCGCTGGAACCTGA |
| | | GGACTTCGCCGTGTATTACTGCCAGCAGCACAACAAGTACCCGTACACCTTCGGAGGCGGT |
| | | ACTAAGGTCGAGATCAAGGGGGGTGGCGGTAGCGGAGGAGGGGGCTCCGGCGGCGGCGGCT |
| | | CAGGGGGCGGAGGAAGCCAAGTGCAGCTGGTGCAGTCAGGCAGCGAACTGAAGAAGCCCGG |
| | | AGCCTCCGTCAAAGTGTCCTGCAAAGCCTCGGGATACACCTTCACCTCCTACTGGATGAAC |
| | | TGGGTCCGCCAGGCACCTGGACAGGGGCTGGAGTGGATGGGAAGGATCGATCCCTACGATT |
| | | CCGAAACCCATTACAATCAGAAGTTCAAGGACCGGTTTGTGTTCTCCGTGGACAAGTCCGT |
| | | GTCCACCGCCTACCTCCAAATTAGCAGCCTGAAGGCGGAGGATACAGCTGTCTACTACTGC |
| | | GCTCGCGGAAACTGGGATGACTATTGGGGCCAGGGAACTACCGTGACTGTGTCCTCCACCA |
| | | CTACCCCAGCACCGAGGCCACCCACCCCGGCTCCTACCATCGCCTCCCAGCCTCTGTCCCT |
| | | GCGTCCGGAggcatgtagacccgcagctggtggggccgtgcatacccggggtcttgacttc |
| | | gcctgcgatatctacatttgggcccctctggctggtacttgcggggtcctgctgctttcac |
| | | tcgtgatcactctttactgtaagcgcggtcggaagaagctgctgtacatctttaagcaacc |
| | | cttcatgaggcctgtgcagactactcaagaggaggacggctgttcatgccggttcccagag |
| | | gaggaggaaggcggctgcgaactgcgcgtgaaattcagccgcagcgcagatgctccagcct |
| | | acaagcaggggcagaaccagctctacaacgaactcaatcttggtcggagagaggagtacga |
| | | cgtgctggacaagcggagaggacgggacccagaaatgggcgggaagccgcgcagaaagaat |
| | | ccccaagagggcctgtacaacgagctccaaaaggataagatggcagaagcctatagcgaga |
| | | ttggtatgaaaggggaacgcagaagaggcaaaggccacgacggactgtaccagggactcag |
| | | caccgccaccaaggacacctatgacgctcttcacatgcaggccctgccgcctcgg |
| hzCAR12 | 2138 | MALPVTALLLPLALLLHAARPEVVLTQSPATLSLSPGERATLSCRASKSISKDLAWYQQK |
| 3-14 AA | | PGQAPRLLIYSGSTLQSGIPARFSGSGSGTDFTLTISSLEPEDFAVYYCQQHNKYPYTFG |
| | | GGTKVEIKGGGGSGGGGSGGGGSGGGGSQVQLVQSGSELKKPGASVKVSCKASGYTFTSY |
| | | WMNWVRQAPGQGLEWMGRIDPYDSETHYNQKFKDRFVFSVDKSVSTAYLQISSLKAEDTA |
| | | VYYCARGNWDDYWGQGTTVTVSSTTTPAPRPPTPAPTIASQPLSLRPEACRPAAGGAVHT |
| | | RGLDFACDIYIWAPLAGTCGVLLLSLVITLYCKRGRKKLLYIFKQPFMRPVQTTQEEDGC |
| | | SCRFPEEEEGGCELRVKFSRSADAPAYKQGQNQLYNELNLGRREEYDVLDKRRGRDPEMG |
| | | GKPRRKNPQEGLYNELQKDKMAEAYSEIGMKGERRRGKGHDGLYQGLSTATKDTYDALHM |
| | | QALPPR |
| hzCAR12 | 2197 | MALPVTALLLPLALLLHAARPEVVLTQSPATLSLSPGERATLSCRASKSISKDLAWYQQK |
| 3-14 | | PGQAPRLLIYSGSTLQSGIPARFSGSGSGTDFTLTISSLEPEDFAVYYCQQHNKYPYTFG |
| scFv | | GGTKVEIKGGGGSGGGGSGGGGSGGGGSQVQLVQSGSELKKPGASVKVSCKASGYTFTSY |
| | | WMNWVRQAPGQGLEWMGRIDPYDSETHYNQKFKDRFVFSVDKSVSTAYLQISSLKAEDTA |
| | | VYYCARGNWDDYWGQGTTVTVSS |
| hzCAR12 | 2256 | QVQLVQSGSELKKPGASVKVSCKASGYTFTSYWMNWVRQAPGQGLEWMGRIDPYDSETHYN |
| 3-14 VH | | QKFKDRFVFSVDKSVSTAYLQISSLKAEDTAVYYCARGNWDDYWGQGTTVTVSS |
| hzCAR12 | 2315 | EVVLTQSPATLSLSPGERATLSCRASKSISKDLAWYQQKPGQAPRLLIYSGSTLQSGIPAR |
| 3-14 VL | | FSGSGSGTDFTLTISSLEPEDFAVYYCQQHNKYPYTFGGGTKVEIK |
| hzCAR12 | 2080 | ATGGCCCTCCCTGTCACCGCCCTGCTGCTTCCGCTGGCTCTTCTGCTCCACGCCGCTCGGC |
| 3-15 NT | | CCGACGTCGTGATGACCCAGTCACCGGCATTCCTGTCCGTGACTCCCGGAGAAAAGGTCAC |
| | | GATTACTTGCCGGGCGTCCAAGAGCATCTCCAAGGACCTCGCCTGGTACCAACAGAAGCCG |
| | | GACCAGGCCCCTAAGCTGTTGATCTACTCGGGGTCCACCCTTCAATCGGGAGTGCCATCGC |
| | | GGTTTAGCGGTTCGGGTTCTGGGACCGACTTCACTTTCACCATCTCCTCACTGGAAGCCGA |
| | | GGATGCCGCCACTTACTACTGTCAGCAGCACAACAAGTATCCGTACACCTTCGGAGGCGGT |
| | | ACCAAAGTGGAGATCAAGGGGGGTGGCGGTAGCGGAGGAGGGGGCTCCGGCGGCGGCGGCT |
| | | CAGGGGGCGGAGGAAGCCAAGTGCAGCTGGTGCAGTCAGGCAGCGAACTGAAGAAGCCCGG |
| | | AGCCTCCGTCAAAGTGTCCTGCAAAGCCTCGGGATACACCTTCACCTCCTACTGGATGAAC |
| | | TGGGTCCGCCAGGCACCTGGACAGGGGCTGGAGTGGATGGGAAGGATCGATCCCTACGATT |
| | | CCGAAACCCATTACAATCAGAAGTTCAAGGACCGGTTTGTGTTCTCCGTGGACAAGTCCGT |
| | | GTCCACCGCCTACCTCCAAATTAGCAGCCTGAAGGCGGAGGATACAGCTGTCTACTACTGC |
| | | GCTCGCGGAAACTGGGATGACTATTGGGGCCAGGGAACTACCGTGACTGTGTCCTCCACCA |
| | | CTACCCCAGCACCGAGGCCACCCACCCCGGCTCCTACCATCGCCTCCCAGCCTCTGTCCCT |
| | | GCGTCCGGAggcatgtagacccgcagctggtggggccgtgcatacccggggtcttgacttc |
| | | gcctgcgatatctacatttgggcccctctggctggtacttgcggggtcctgctgctttcac |
| | | tcgtgatcactctttactgtaagcgcggtcggaagaagctgctgtacatctttaagcaacc |
| | | cttcatgaggcctgtgcagactactcaagaggaggacggctgttcatgccggttcccagag |
| | | gaggaggaaggcggctgcgaactgcgcgtgaaattcagccgcagcgcagatgctccagcct |
| | | acaagcaggggcagaaccagctctacaacgaactcaatcttggtcggagagaggagtacga |
| | | cgtgctggacaagcggagaggacgggacccagaaatgggcgggaagccgcgcagaaagaat |
| | | ccccaagagggcctgtacaacgagctccaaaaggataagatggcagaagcctatagcgaga |
| | | ttggtatgaaaggggaacgcagaagaggcaaaggccacgacggactgtaccagggactcag |
| | | caccgccaccaaggacacctatgacgctcttcacatgcaggccctgccgcctcgg |
| hzCAR12 | 2139 | MALPVTALLLPLALLLHAARPDVVMTQSPAFLSVTPGEKVTITCRASKSISKDLAWYQQK |
| 3-15 AA | | PDQAPKLLIYSGSTLQSGVPSRFSGSGSGTDFTFTISSLEAEDAATYYCQQHNKYPYTFG |
| | | GGTKVEIKGGGGSGGGGSGGGGSGGGGSQVQLVQSGSELKKPGASVKVSCKASGYTFTSY |
| | | WMNWVRQAPGQGLEWMGRIDPYDSETHYNQKFKDRFVFSVDKSVSTAYLQISSLKAEDTA |
| | | VYYCARGNWDDYWGQGTTVTVSSTTTPAPRPPTPAPTIASQPLSLRPEACRPAAGGAVHT |
| | | RGLDFACDIYIWAPLAGTCGVLLLSLVITLYCKRGRKKLLYIFKQPFMRPVQTTQEEDGC |
| | | SCRFPEEEEGGCELRVKFSRSADAPAYKQGQNQLYNELNLGRREEYDVLDKRRGRDPEMG |
| | | GKPRRKNPQEGLYNELQKDKMAEAYSEIGMKGERRRGKGHDGLYQGLSTATKDTYDALHM |
| | | QALPPR |
| hzCAR12 | 2198 | MALPVTALLLPLALLLHAARPDVVMTQSPAFLSVTPGEKVTITCRASKSISKDLAWYQQK |
| 3-15 | | PDQAPKLLIYSGSTLQSGVPSRFSGSGSGTDFTFTISSLEAEDAATYYCQQHNKYPYTFG |
| scFv | | GGTKVEIKGGGGSGGGGSGGGGSGGGGSQVQLVQSGSELKKPGASVKVSCKASGYTFTSY |
| | | WMNWVRQAPGQGLEWMGRIDPYDSETHYNQKFKDRFVFSVDKSVSTAYLQISSLKAEDTA |
| | | VYYCARGNWDDYWGQGTTVTVSS |
| hzCAR12 | 2257 | QVQLVQSGSELKKPGASVKVSCKASGYTFTSYWMNWVRQAPGQGLEWMGRIDPYDSETHYN |
| 3-15 VH | | QKFKDRFVFSVDKSVSTAYLQISSLKAEDTAVYYCARGNWDDYWGQGTTVTVSS |
| hzCAR12 | 2316 | DVVMTQSPAFLSVTPGEKVTITCRASKSISKDLAWYQQKPDQAPKLLIYSGSTLQSGVPSR |
| 3-15 VL | | FSGSGSGTDFTFTISSLEAEDAATYYCQQHNKYPYTFGGGTKVEIK |
| hzCAR12 | 2081 | ATGGCCCTCCCTGTCACCGCCCTGCTGCTTCCGCTGGCTCTTCTGCTCCACGCCGCTCGGC |
| 3-16 NT | | CCGACGTGGTCATGACTCAGTCCCCGGACTCACTCGCGGTGTCGCTTGGAGAGAGAGCGAC |
| | | CATCAACTGTCGGGCCTCAAAGAGCATCAGCAAGGACCTGGCCTGGTACCAGCAGAAGCCG |
| | | GGACAGCCGCCAAAGCTGCTGATCTACTCCGGGTCCACCTTGCAATCTGGTGTCCCTGACC |
| | | GGTTCTCCGGTTCCGGGTCGGGTACCGACTTCACGCTCACTATTTCGTCGCTGCAAGCCGA |
| | | AGATGTGGCCGTGTACTATTGCCAACAGCACAACAAGTACCCCTACACTTTTGGCGGAGGC |
| | | ACCAAGGTGGAAATCAAGGGGGGTGGCGGTAGCGGAGGAGGGGGCTCCGGCGGCGGCGGCT |
| | | CAGGGGGCGGAGGAAGCCAAGTGCAGCTGGTGCAGTCAGGCAGCGAACTGAAGAAGCCCGG |
| | | AGCCTCCGTCAAAGTGTCCTGCAAAGCCTCGGGATACACCTTCACCTCCTACTGGATGAAC |
| | | TGGGTCCGCCAGGCACCTGGACAGGGGCTGGAGTGGATGGGAAGGATCGATCCCTACGATT |
| | | CCGAAACCCATTACAATCAGAAGTTCAAGGACCGGTTTGTGTTCTCCGTGGACAAGTCCGT |
| | | GTCCACCGCCTACCTCCAAATTAGCAGCCTGAAGGCGGAGGATACAGCTGTCTACTACTGC |
| | | GCTCGCGGAAACTGGGATGACTATTGGGGCCAGGGAACTACCGTGACTGTGTCCTCCACCA |
| | | CTACCCCAGCACCGAGGCCACCCACCCCGGCTCCTACCATCGCCTCCCAGCCTCTGTCCCT |
| | | GCGTCCGGAggcatgtagacccgcagctggtggggccgtgcatacccggggtcttgacttc |
| | | gcctgcgatatctacatttgggcccctctggctggtacttgcggggtcctgctgctttcac |
| | | tcgtgatcactctttactgtaagcgcggtcggaagaagctgctgtacatctttaagcaacc |
| | | cttcatgaggcctgtgcagactactcaagaggaggacggctgttcatgccggttcccagag |
| | | gaggaggaaggcggctgcgaactgcgcgtgaaattcagccgcagcgcagatgctccagcct |
| | | acaagcaggggcagaaccagctctacaacgaactcaatcttggtcggagagaggagtacga |
| | | cgtgctggacaagcggagaggacgggacccagaaatgggcgggaagccgcgcagaaagaat |
| | | ccccaagagggcctgtacaacgagctccaaaaggataagatggcagaagcctatagcgaga |
| | | ttggtatgaaaggggaacgcagaagaggcaaaggccacgacggactgtaccagggactcag |
| | | caccgccaccaaggacacctatgacgctcttcacatgcaggccctgccgcctcgg |
| hzCAR12 | 2140 | MALPVTALLLPLALLLHAARPDVVMTQSPDSLAVSLGERATINCRASKSISKDLAWYQQK |
| 3-16 AA | | PGQPPKLLIYSGSTLQSGVPDRFSGSGSGTDFTLTISSLQAEDVAVYYCQQHNKYPYTFG |
| | | GGTKVEIKGGGGSGGGGSGGGGSGGGGSQVQLVQSGSELKKPGASVKVSCKASGYTFTSY |
| | | WMNWVRQAPGQGLEWMGRIDPYDSETHYNQKFKDRFVFSVDKSVSTAYLQISSLKAEDTA |
| | | VYYCARGNWDDYWGQGTTVTVSSTTTPAPRPPTPAPTIASQPLSLRPEACRPAAGGAVHT |
| | | RGLDFACDIYIWAPLAGTCGVLLLSLVITLYCKRGRKKLLYIFKQPFMRPVQTTQEEDGC |
| | | SCRFPEEEEGGCELRVKFSRSADAPAYKQGQNQLYNELNLGRREEYDVLDKRRGRDPEMG |
| | | GKPRRKNPQEGLYNELQKDKMAEAYSEIGMKGERRRGKGHDGLYQGLSTATKDTYDALHM |
| | | QALPPR |
| hzCAR12 | 2199 | MALPVTALLLPLALLLHAARPDVVMTQSPDSLAVSLGERATINCRASKSISKDLAWYQQK |
| 3-16 | | PGQPPKLLIYSGSTLQSGVPDRFSGSGSGTDFTLTISSLQAEDVAVYYCQQHNKYPYTFG |
| scFv | | GGTKVEIKGGGGSGGGGSGGGGSGGGGSQVQLVQSGSELKKPGASVKVSCKASGYTFTSY |
| | | WMNWVRQAPGQGLEWMGRIDPYDSETHYNQKFKDRFVFSVDKSVSTAYLQISSLKAEDTA |
| | | VYYCARGNWDDYWGQGTTVTVSS |
| hzCAR12 | 2258 | QVQLVQSGSELKKPGASVKVSCKASGYTFTSYWMNWVRQAPGQGLEWMGRIDPYDSETHYN |
| 3-16 VH | | QKFKDRFVFSVDKSVSTAYLQISSLKAEDTAVYYCARGNWDDYWGQGTTVTVSS |
| hzCAR12 | 2317 | DVVMTQSPDSLAVSLGERATINCRASKSISKDLAWYQQKPGQPPKLLIYSGSTLQSGVPDR |
| 3-16 VL | | FSGSGSGTDFTLTISSLQAEDVAVYYCQQHNKYPYTFGGGTKVEIK |
| hzCAR12 | 2082 | ATGGCCCTCCCTGTCACCGCCCTGCTGCTTCCGCTGGCTCTTCTGCTCCACGCCGCTCGGC |
| 3-17 NT | | CCGAGGTGCAGCTGGTGCAGAGCGGAGCCGAGGTCAAGAAGCCTGGAGAATCCCTGAGGAT |
| | | CAGCTGCAAAGGCAGCGGGTATACCTTCACCTCCTACTGGATGAATTGGGTCCGCCAGATG |
| | | CCCGGAAAAGGCCTGGAGTGGATGGGACGGATTGACCCCTACGACTCGGAAACCCATTACA |
| | | ACCAGAAGTTCAAGGATCACGTGACCATCTCCGTGGACAAGTCCATTTCCACTGCGTACCT |
| | | CCAGTGGTCAAGCCTGAAGGCCTCCGACACTGCTATGTACTACTGCGCACGCGGAAACTGG |
| | | GATGATTACTGGGGACAGGGAACAACCGTGACTGTGTCCTCCGGGGGTGGCGGTAGCGGAG |
| | | GAGGGGGCTCCGGCGGCGGCGGCTCAGGGGGCGGAGGAAGCGACGTGCAGCTCACCCAGTC |
| | | GCCCTCATTTCTGTCGGCCTCAGTGGGAGACAGAGTGACCATTACTTGTCGGGCCTCCAAG |
| | | AGCATCTCCAAGGACCTGGCCTGGTATCAGCAGAAGCCAGGAAAGGCGCCTAAGTTGCTCA |
| | | TCTACTCGGGGTCGACCCTGCAATCTGGCGTGCCGTCCCGGTTCTCCGGTTCGGGAAGCGG |
| | | TACCGAATTCACCCTTACTATCTCCTCCCTGCAACCGGAGGACTTCGCCACCTACTACTGC |
| | | CAACAGCACAACAAGTACCCGTACACTTTCGGGGGTGGCACGAAGGTCGAAATCAAGACCA |
| | | CTACCCCAGCACCGAGGCCACCCACCCCGGCTCCTACCATCGCCTCCCAGCCTCTGTCCCT |
| | | GCGTCCGGAggcatgtagacccgcagctggtggggccgtgcatacccggggtcttgacttc |
| | | gcctgcgatatctacatttgggcccctctggctggtacttgcggggtcctgctgctttcac |
| | | tcgtgatcactctttactgtaagcgcggtcggaagaagctgctgtacatctttaagcaacc |
| | | cttcatgaggcctgtgcagactactcaagaggaggacggctgttcatgccggttcccagag |
| | | gaggaggaaggcggctgcgaactgcgcgtgaaattcagccgcagcgcagatgctccagcct |
| | | acaagcaggggcagaaccagctctacaacgaactcaatcttggtcggagagaggagtacga |
| | | cgtgctggacaagcggagaggacgggacccagaaatgggcgggaagccgcgcagaaagaat |
| | | ccccaagagggcctgtacaacgagctccaaaaggataagatggcagaagcctatagcgaga |
| | | ttggtatgaaaggggaacgcagaagaggcaaaggccacgacggactgtaccagggactcag |
| | | caccgccaccaaggacacctatgacgctcttcacatgcaggccctgccgcctcgg |
| hzCAR12 | 2141 | MALPVTALLLPLALLLHAARPEVQLVQSGAEVKKPGESLRISCKGSGYTFTSYWMNWVRQ |
| 3-17 AA | | MPGKGLEWMGRIDPYDSETHYNQKFKDHVTISVDKSISTAYLQWSSLKASDTAMYYCARG |
| | | NWDDYWGQGTTVTVSSGGGGSGGGGSGGGGSGGGGSDVQLTQSPSFLSASVGDRVTITCR |
| | | ASKSISKDLAWYQQKPGKAPKLLIYSGSTLQSGVPSRFSGSGSGTEFTLTISSLQPEDFA |
| | | TYYCQQHNKYPYTFGGGTKVEIKTTTPAPRPPTPAPTIASQPLSLRPEACRPAAGGAVHT |
| | | RGLDFACDIYIWAPLAGTCGVLLLSLVITLYCKRGRKKLLYIFKQPFMRPVQTTQEEDGC |
| | | SCRFPEEEEGGCELRVKFSRSADAPAYKQGQNQLYNELNLGRREEYDVLDKRRGRDPEMG |
| | | GKPRRKNPQEGLYNELQKDKMAEAYSEIGMKGERRRGKGHDGLYQGLSTATKDTYDALHM |
| | | QALPPR |
| hzCAR12 | 2200 | MALPVTALLLPLALLLHAARPEVQLVQSGAEVKKPGESLRISCKGSGYTFTSYWMNWVRQ |
| 3-17 | | MPGKGLEWMGRIDPYDSETHYNQKFKDHVTISVDKSISTAYLQWSSLKASDTAMYYCARG |
| scFv | | NWDDYWGQGTTVTVSSGGGGSGGGGSGGGGSGGGGSDVQLTQSPSFLSASVGDRVTITCR |
| | | ASKSISKDLAWYQQKPGKAPKLLIYSGSTLQSGVPSRFSGSGSGTEFTLTISSLQPEDFA |
| | | TYYCQQHNKYPYTFGGGTKVEIK |
| hzCAR12 | 2259 | EVQLVQSGAEVKKPGESLRISCKGSGYTFTSYWMNWVRQMPGKGLEWMGRIDPYDSETHYN |
| 3-17 VH | | QKFKDHVTISVDKSISTAYLQWSSLKASDTAMYYCARGNWDDYWGQGTTVTVSS |
| hzCAR12 | 2318 | DVQLTQSPSFLSASVGDRVTITCRASKSISKDLAWYQQKPGKAPKLLIYSGSTLQSGVPSR |
| 3-17 VL | | FSGSGSGTEFTLTISSLQPEDFATYYCQQHNKYPYTFGGGTKVEIK |
| hzCAR12 | 2083 | ATGGCCCTCCCTGTCACCGCCCTGCTGCTTCCGCTGGCTCTTCTGCTCCACGCCGCTCGGC |
| 3-18 NT | | CCGAGGTGCAGCTGGTGCAGAGCGGAGCCGAGGTCAAGAAGCCTGGAGAATCCCTGAGGAT |
| | | CAGCTGCAAAGGCAGCGGGTATACCTTCACCTCCTACTGGATGAATTGGGTCCGCCAGATG |
| | | CCCGGAAAAGGCCTGGAGTGGATGGGACGGATTGACCCCTACGACTCGGAAACCCATTACA |
| | | ACCAGAAGTTCAAGGATCACGTGACCATCTCCGTGGACAAGTCCATTTCCACTGCGTACCT |
| | | CCAGTGGTCAAGCCTGAAGGCCTCCGACACTGCTATGTACTACTGCGCACGCGGAAACTGG |
| | | GATGATTACTGGGGACAGGGAACAACCGTGACTGTGTCCTCCGGGGGTGGCGGTAGCGGAG |
| | | GAGGGGGCTCCGGCGGCGGCGGCTCAGGGGGCGGAGGAAGCGAAGTGGTGCTGACCCAGTC |
| | | GCCCGCAACCCTCTCTCTGTCGCCGGGAGAACGCGCCACTCTTTCCTGTCGGGCGTCCAAG |
| | | AGCATCTCAAAGGACCTCGCCTGGTACCAGCAGAAGCCTGGTCAAGCCCCGCGGCTGCTGA |
| | | TCTACTCCGGCTCCACGCTGCAATCAGGAATCCCAGCCAGATTTTCCGGTTCGGGGTCGGG |
| | | GACTGACTTCACCTTGACCATTAGCTCGCTGGAACCTGAGGACTTCGCCGTGTATTACTGC |
| | | CAGCAGCACAACAAGTACCCGTACACCTTCGGAGGCGGTACTAAGGTCGAGATCAAGACCA |
| | | CTACCCCAGCACCGAGGCCACCCACCCCGGCTCCTACCATCGCCTCCCAGCCTCTGTCCCT |
| | | GCGTCCGGAggcatgtagacccgcagctggtggggccgtgcatacccggggtcttgacttc |
| | | gcctgcgatatctacatttgggcccctctggctggtacttgcggggtcctgctgctttcac |
| | | tcgtgatcactctttactgtaagcgcggtcggaagaagctgctgtacatctttaagcaacc |
| | | cttcatgaggcctgtgcagactactcaagaggaggacggctgttcatgccggttcccagag |
| | | gaggaggaaggcggctgcgaactgcgcgtgaaattcagccgcagcgcagatgctccagcct |
| | | acaagcaggggcagaaccagctctacaacgaactcaatcttggtcggagagaggagtacga |
| | | cgtgctggacaagcggagaggacgggacccagaaatgggcgggaagccgcgcagaaagaat |
| | | ccccaagagggcctgtacaacgagctccaaaaggataagatggcagaagcctatagcgaga |
| | | ttggtatgaaaggggaacgcagaagaggcaaaggccacgacggactgtaccagggactcag |
| | | caccgccaccaaggacacctatgacgctcttcacatgcaggccctgccgcctcgg |
| hzCAR12 | 2142 | MALPVTALLLPLALLLHAARPEVQLVQSGAEVKKPGESLRISCKGSGYTFTSYWMNWVRQ |
| 3-18 AA | | MPGKGLEWMGRIDPYDSETHYNQKFKDHVTISVDKSISTAYLQWSSLKASDTAMYYCARG |
| | | NWDDYWGQGTTVTVSSGGGGSGGGGSGGGGSGGGGSEVVLTQSPATLSLSPGERATLSCR |
| | | ASKSISKDLAWYQQKPGQAPRLLIYSGSTLQSGIPARFSGSGSGTDFTLTISSLEPEDFA |
| | | VYYCQQHNKYPYTFGGGTKVEIKTTTPAPRPPTPAPTIASQPLSLRPEACRPAAGGAVHT |
| | | RGLDFACDIYIWAPLAGTCGVLLLSLVITLYCKRGRKKLLYIFKQPFMRPVQTTQEEDGC |
| | | SCRFPEEEEGGCELRVKFSRSADAPAYKQGQNQLYNELNLGRREEYDVLDKRRGRDPEMG |
| | | GKPRRKNPQEGLYNELQKDKMAEAYSEIGMKGERRRGKGHDGLYQGLSTATKDTYDALHM |
| | | QALPPR |
| hzCAR12 | 2201 | MALPVTALLLPLALLLHAARPEVQLVQSGAEVKKPGESLRISCKGSGYTFTSYWMNWVRQ |
| 3-18 | | MPGKGLEWMGRIDPYDSETHYNQKFKDHVTISVDKSISTAYLQWSSLKASDTAMYYCARG |
| scFv | | NWDDYWGQGTTVTVSSGGGGSGGGGSGGGGSGGGGSEVVLTQSPATLSLSPGERATLSCR |
| | | ASKSISKDLAWYQQKPGQAPRLLIYSGSTLQSGIPARFSGSGSGTDFTLTISSLEPEDFA |
| | | VYYCQQHNKYPYTFGGGTKVEIK |
| hzCAR12 | 2260 | EVQLVQSGAEVKKPGESLRISCKGSGYTFTSYWMNWVRQMPGKGLEWMGRIDPYDSETHYN |
| 3-18 VH | | QKFKDHVTISVDKSISTAYLQWSSLKASDTAMYYCARGNWDDYWGQGTTVTVSS |
| hzCAR12 | 2319 | EVVLTQSPATLSLSPGERATLSCRASKSISKDLAWYQQKPGQAPRLLIYSGSTLQSGIPAR |
| 3-18 VL | | FSGSGSGTDFTLTISSLEPEDFAVYYCQQHNKYPYTFGGGTKVEIK |
| hzCAR12 | 2084 | ATGGCCCTCCCTGTCACCGCCCTGCTGCTTCCGCTGGCTCTTCTGCTCCACGCCGCTCGGC |
| 3-19 NT | | CCGAGGTGCAGCTGGTGCAGAGCGGAGCCGAGGTCAAGAAGCCTGGAGAATCCCTGAGGAT |
| | | CAGCTGCAAAGGCAGCGGGTATACCTTCACCTCCTACTGGATGAATTGGGTCCGCCAGATG |
| | | CCCGGAAAAGGCCTGGAGTGGATGGGACGGATTGACCCCTACGACTCGGAAACCCATTACA |
| | | ACCAGAAGTTCAAGGATCACGTGACCATCTCCGTGGACAAGTCCATTTCCACTGCGTACCT |
| | | CCAGTGGTCAAGCCTGAAGGCCTCCGACACTGCTATGTACTACTGCGCACGCGGAAACTGG |
| | | GATGATTACTGGGGACAGGGAACAACCGTGACTGTGTCCTCCGGGGGTGGCGGTAGCGGAG |
| | | GAGGGGGCTCCGGCGGCGGCGGCTCAGGGGGCGGAGGAAGCGACGTCGTGATGACCCAGTC |
| | | ACCGGCATTCCTGTCCGTGACTCCCGGAGAAAAGGTCACGATTACTTGCCGGGCGTCCAAG |
| | | AGCATCTCCAAGGACCTCGCCTGGTACCAACAGAAGCCGGACCAGGCCCCTAAGCTGTTGA |
| | | TCTACTCGGGGTCCACCCTTCAATCGGGAGTGCCATCGCGGTTTAGCGGTTCGGGTTCTGG |
| | | GACCGACTTCACTTTCACCATCTCCTCACTGGAAGCCGAGGATGCCGCCACTTACTACTGT |
| | | CAGCAGCACAACAAGTATCCGTACACCTTCGGAGGCGGTACCAAAGTGGAGATCAAGACCA |
| | | CTACCCCAGCACCGAGGCCACCCACCCCGGCTCCTACCATCGCCTCCCAGCCTCTGTCCCT |
| | | GCGTCCGGAggcatgtagacccgcagctggtggggccgtgcatacccggggtcttgacttc |
| | | gcctgcgatatctacatttgggcccctctggctggtacttgcggggtcctgctgctttcac |
| | | tcgtgatcactctttactgtaagcgcggtcggaagaagctgctgtacatctttaagcaacc |
| | | cttcatgaggcctgtgcagactactcaagaggaggacggctgttcatgccggttcccagag |
| | | gaggaggaaggcggctgcgaactgcgcgtgaaattcagccgcagcgcagatgctccagcct |
| | | acaagcaggggcagaaccagctctacaacgaactcaatcttggtcggagagaggagtacga |
| | | cgtgctggacaagcggagaggacgggacccagaaatgggcgggaagccgcgcagaaagaat |
| | | ccccaagagggcctgtacaacgagctccaaaaggataagatggcagaagcctatagcgaga |
| | | ttggtatgaaaggggaacgcagaagaggcaaaggccacgacggactgtaccagggactcag |
| | | caccgccaccaaggacacctatgacgctcttcacatgcaggccctgccgcctcgg |
| hzCAR12 | 2143 | MALPVTALLLPLALLLHAARPEVQLVQSGAEVKKPGESLRISCKGSGYTFTSYWMNWVRQ |
| 3-19 AA | | MPGKGLEWMGRIDPYDSETHYNQKFKDHVTISVDKSISTAYLQWSSLKASDTAMYYCARG |
| | | NWDDYWGQGTTVTVSSGGGGSGGGGSGGGGSGGGGSDVVMTQSPAFLSVTPGEKVTITCR |
| | | ASKSISKDLAWYQQKPDQAPKLLIYSGSTLQSGVPSRFSGSGSGTDFTFTISSLEAEDAA |
| | | TYYCQQHNKYPYTFGGGTKVEIKTTTPAPRPPTPAPTIASQPLSLRPEACRPAAGGAVHT |
| | | RGLDFACDIYIWAPLAGTCGVLLLSLVITLYCKRGRKKLLYIFKQPFMRPVQTTQEEDGC |
| | | SCRFPEEEEGGCELRVKFSRSADAPAYKQGQNQLYNELNLGRREEYDVLDKRRGRDPEMG |
| | | GKPRRKNPQEGLYNELQKDKMAEAYSEIGMKGERRRGKGHDGLYQGLSTATKDTYDALHM |
| | | QALPPR |
| hzCAR12 | 2202 | MALPVTALLLPLALLLHAARPEVQLVQSGAEVKKPGESLRISCKGSGYTFTSYWMNWVRQ |
| 3-19 | | MPGKGLEWMGRIDPYDSETHYNQKFKDHVTISVDKSISTAYLQWSSLKASDTAMYYCARG |
| scFv | | NWDDYWGQGTTVTVSSGGGGSGGGGSGGGGSGGGGSDVVMTQSPAFLSVTPGEKVTITCR |
| | | ASKSISKDLAWYQQKPDQAPKLLIYSGSTLQSGVPSRFSGSGSGTDFTFTISSLEAEDAA |
| | | TYYCQQHNKYPYTFGGGTKVEIK |
| hzCAR12 | 2261 | EVQLVQSGAEVKKPGESLRISCKGSGYTFTSYWMNWVRQMPGKGLEWMGRIDPYDSETHYN |
| 3-19 VH | | QKFKDHVTISVDKSISTAYLQWSSLKASDTAMYYCARGNWDDYWGQGTTVTVSS |
| hzCAR12 | 2320 | DVVMTQSPAFLSVTPGEKVTITCRASKSISKDLAWYQQKPDQAPKLLIYSGSTLQSGVPSR |
| 3-19 VL | | FSGSGSGTDFTFTISSLEAEDAATYYCQQHNKYPYTFGGGTKVEIK |
| hzCAR12 | 2085 | ATGGCCCTCCCTGTCACCGCCCTGCTGCTTCCGCTGGCTCTTCTGCTCCACGCCGCTCGGC |
| 3-20 NT | | CCGAGGTGCAGCTGGTGCAGAGCGGAGCCGAGGTCAAGAAGCCTGGAGAATCCCTGAGGAT |
| | | CAGCTGCAAAGGCAGCGGGTATACCTTCACCTCCTACTGGATGAATTGGGTCCGCCAGATG |
| | | CCCGGAAAAGGCCTGGAGTGGATGGGACGGATTGACCCCTACGACTCGGAAACCCATTACA |
| | | ACCAGAAGTTCAAGGATCACGTGACCATCTCCGTGGACAAGTCCATTTCCACTGCGTACCT |
| | | CCAGTGGTCAAGCCTGAAGGCCTCCGACACTGCTATGTACTACTGCGCACGCGGAAACTGG |
| | | GATGATTACTGGGGACAGGGAACAACCGTGACTGTGTCCTCCGGGGGTGGCGGTAGCGGAG |
| | | GAGGGGGCTCCGGCGGCGGCGGCTCAGGGGGCGGAGGAAGCGACGTGGTCATGACTCAGTC |
| | | CCCGGACTCACTCGCGGTGTCGCTTGGAGAGAGAGCGACCATCAACTGTCGGGCCTCAAAG |
| | | AGCATCAGCAAGGACCTGGCCTGGTACCAGCAGAAGCCGGGACAGCCGCCAAAGCTGCTGA |
| | | TCTACTCCGGGTCCACCTTGCAATCTGGTGTCCCTGACCGGTTCTCCGGTTCCGGGTCGGG |
| | | TACCGACTTCACGCTCACTATTTCGTCGCTGCAAGCCGAAGATGTGGCCGTGTACTATTGC |
| | | CAACAGCACAACAAGTACCCCTACACTTTTGGCGGAGGCACCAAGGTGGAAATCAAGACCA |
| | | CTACCCCAGCACCGAGGCCACCCACCCCGGCTCCTACCATCGCCTCCCAGCCTCTGTCCCT |
| | | GCGTCCGGAggcatgtagacccgcagctggtggggccgtgcatacccggggtcttgacttc |
| | | gcctgcgatatctacatttgggcccctctggctggtacttgcggggtcctgctgctttcac |
| | | tcgtgatcactctttactgtaagcgcggtcggaagaagctgctgtacatctttaagcaacc |
| | | cttcatgaggcctgtgcagactactcaagaggaggacggctgttcatgccggttcccagag |
| | | gaggaggaaggcggctgcgaactgcgcgtgaaattcagccgcagcgcagatgctccagcct |
| | | acaagcaggggcagaaccagctctacaacgaactcaatcttggtcggagagaggagtacga |
| | | cgtgctggacaagcggagaggacgggacccagaaatgggcgggaagccgcgcagaaagaat |
| | | ccccaagagggcctgtacaacgagctccaaaaggataagatggcagaagcctatagcgaga |
| | | ttggtatgaaaggggaacgcagaagaggcaaaggccacgacggactgtaccagggactcag |
| | | caccgccaccaaggacacctatgacgctcttcacatgcaggccctgccgcctcgg |
| hzCAR12 | 2144 | MALPVTALLLPLALLLHAARPEVQLVQSGAEVKKPGESLRISCKGSGYTFTSYWMNWVRQ |
| 3-20 AA | | MPGKGLEWMGRIDPYDSETHYNQKFKDHVTISVDKSISTAYLQWSSLKASDTAMYYCARG |
| | | NWDDYWGQGTTVTVSSGGGGSGGGGSGGGGSGGGGSDVVMTQSPDSLAVSLGERATINCR |
| | | ASKSISKDLAWYQQKPGQPPKLLIYSGSTLQSGVPDRFSGSGSGTDFTLTISSLQAEDVA |
| | | VYYCQQHNKYPYTFGGGTKVEIKTTTPAPRPPTPAPTIASQPLSLRPEACRPAAGGAVHT |
| | | RGLDFACDIYIWAPLAGTCGVLLLSLVITLYCKRGRKKLLYIFKQPFMRPVQTTQEEDGC |
| | | SCRFPEEEEGGCELRVKFSRSADAPAYKQGQNQLYNELNLGRREEYDVLDKRRGRDPEMG |
| | | GKPRRKNPQEGLYNELQKDKMAEAYSEIGMKGERRRGKGHDGLYQGLSTATKDTYDALHM |
| | | QALPPR |
| hzCAR12 | 2203 | MALPVTALLLPLALLLHAARPEVQLVQSGAEVKKPGESLRISCKGSGYTFTSYWMNWVRQ |
| 3-20 | | MPGKGLEWMGRIDPYDSETHYNQKFKDHVTISVDKSISTAYLQWSSLKASDTAMYYCARG |
| scFv | | NWDDYWGQGTTVTVSSGGGGSGGGGSGGGGSGGGGSDVVMTQSPDSLAVSLGERATINCR |
| | | ASKSISKDLAWYQQKPGQPPKLLIYSGSTLQSGVPDRFSGSGSGTDFTLTISSLQAEDVA |
| | | VYYCQQHNKYPYTFGGGTKVEIK |
| hzCAR12 | 2262 | EVQLVQSGAEVKKPGESLRISCKGSGYTFTSYWMNWVRQMPGKGLEWMGRIDPYDSETHYN |
| 3-20 VH | | QKFKDHVTISVDKSISTAYLQWSSLKASDTAMYYCARGNWDDYWGQGTTVTVSS |
| hzCAR12 | 2321 | DVVMTQSPDSLAVSLGERATINCRASKSISKDLAWYQQKPGQPPKLLIYSGSTLQSGVPDR |
| 3-20 VL | | FSGSGSGTDFTLTISSLQAEDVAVYYCQQHNKYPYTFGGGTKVEIK |
| hzCAR12 | 2086 | ATGGCCCTCCCTGTCACCGCCCTGCTGCTTCCGCTGGCTCTTCTGCTCCACGCCGCTCGGC |
| 3-21 NT | | CCGACGTGCAGCTCACCCAGTCGCCCTCATTTCTGTCGGCCTCAGTGGGAGACAGAGTGAC |
| | | CATTACTTGTCGGGCCTCCAAGAGCATCTCCAAGGACCTGGCCTGGTATCAGCAGAAGCCA |
| | | GGAAAGGCGCCTAAGTTGCTCATCTACTCGGGGTCGACCCTGCAATCTGGCGTGCCGTCCC |
| | | GGTTCTCCGGTTCGGGAAGCGGTACCGAATTCACCCTTACTATCTCCTCCCTGCAACCGGA |
| | | GGACTTCGCCACCTACTACTGCCAACAGCACAACAAGTACCCGTACACTTTCGGGGGTGGC |
| | | ACGAAGGTCGAAATCAAGGGGGGTGGCGGTAGCGGAGGAGGGGGCTCCGGCGGCGGCGGCT |
| | | CAGGGGGCGGAGGAAGCGAGGTGCAGCTGGTGCAGAGCGGAGCCGAGGTCAAGAAGCCTGG |
| | | AGAATCCCTGAGGATCAGCTGCAAAGGCAGCGGGTATACCTTCACCTCCTACTGGATGAAT |
| | | TGGGTCCGCCAGATGCCCGGAAAAGGCCTGGAGTGGATGGGACGGATTGACCCCTACGACT |
| | | CGGAAACCCATTACAACCAGAAGTTCAAGGATCACGTGACCATCTCCGTGGACAAGTCCAT |
| | | TTCCACTGCGTACCTCCAGTGGTCAAGCCTGAAGGCCTCCGACACTGCTATGTACTACTGC |
| | | GCACGCGGAAACTGGGATGATTACTGGGGACAGGGAACAACCGTGACTGTGTCCTCCACCA |
| | | CTACCCCAGCACCGAGGCCACCCACCCCGGCTCCTACCATCGCCTCCCAGCCTCTGTCCCT |
| | | GCGTCCGGAggcatgtagacccgcagctggtggggccgtgcatacccggggtcttgacttc |
| | | gcctgcgatatctacatttgggcccctctggctggtacttgcggggtcctgctgctttcac |
| | | tcgtgatcactctttactgtaagcgcggtcggaagaagctgctgtacatctttaagcaacc |
| | | cttcatgaggcctgtgcagactactcaagaggaggacggctgttcatgccggttcccagag |
| | | gaggaggaaggcggctgcgaactgcgcgtgaaattcagccgcagcgcagatgctccagcct |
| | | acaagcaggggcagaaccagctctacaacgaactcaatcttggtcggagagaggagtacga |
| | | cgtgctggacaagcggagaggacgggacccagaaatgggcgggaagccgcgcagaaagaat |
| | | ccccaagagggcctgtacaacgagctccaaaaggataagatggcagaagcctatagcgaga |
| | | ttggtatgaaaggggaacgcagaagaggcaaaggccacgacggactgtaccagggactcag |
| | | caccgccaccaaggacacctatgacgctcttcacatgcaggccctgccgcctcgg |
| hzCAR12 | 2145 | MALPVTALLLPLALLLHAARPDVQLTQSPSFLSASVGDRVTITCRASKSISKDLAWYQQK |
| 3-21 AA | | PGKAPKLLIYSGSTLQSGVPSRFSGSGSGTEFTLTISSLQPEDFATYYCQQHNKYPYTFG |
| | | GGTKVEIKGGGGSGGGGSGGGGSGGGGSEVQLVQSGAEVKKPGESLRISCKGSGYTFTSY |
| | | WMNWVRQMPGKGLEWMGRIDPYDSETHYNQKFKDHVTISVDKSISTAYLQWSSLKASDTA |
| | | MYYCARGNWDDYWGQGTTVTVSSTTTPAPRPPTPAPTIASQPLSLRPEACRPAAGGAVHT |
| | | RGLDFACDIYIWAPLAGTCGVLLLSLVITLYCKRGRKKLLYIFKQPFMRPVQTTQEEDGC |
| | | SCRFPEEEEGGCELRVKFSRSADAPAYKQGQNQLYNELNLGRREEYDVLDKRRGRDPEMG |
| | | GKPRRKNPQEGLYNELQKDKMAEAYSEIGMKGERRRGKGHDGLYQGLSTATKDTYDALHM |
| | | QALPPR |
| hzCAR12 | 2204 | MALPVTALLLPLALLLHAARPDVQLTQSPSFLSASVGDRVTITCRASKSISKDLAWYQQK |
| 3-21 | | PGKAPKLLIYSGSTLQSGVPSRFSGSGSGTEFTLTISSLQPEDFATYYCQQHNKYPYTFG |
| scFv | | GGTKVEIKGGGGSGGGGSGGGGSGGGGSEVQLVQSGAEVKKPGESLRISCKGSGYTFTSY |
| | | WMNWVRQMPGKGLEWMGRIDPYDSETHYNQKFKDHVTISVDKSISTAYLQWSSLKASDTA |
| | | MYYCARGNWDDYWGQGTTVTVSS |
| hzCAR12 | 2263 | EVQLVQSGAEVKKPGESLRISCKGSGYTFTSYWMNWVRQMPGKGLEWMGRIDPYDSETHYN |
| 3-21 VH | | QKFKDHVTISVDKSISTAYLQWSSLKASDTAMYYCARGNWDDYWGQGTTVTVSS |
| hzCAR12 | 2322 | DVQLTQSPSFLSASVGDRVTITCRASKSISKDLAWYQQKPGKAPKLLIYSGSTLQSGVPSR |
| 3-21 VL | | FSGSGSGTEFTLTISSLQPEDFATYYCQQHNKYPYTFGGGTKVEIK |
| hzCAR12 | 2087 | ATGGCCCTCCCTGTCACCGCCCTGCTGCTTCCGCTGGCTCTTCTGCTCCACGCCGCTCGGC |
| 3-22 NT | | CCGAAGTGGTGCTGACCCAGTCGCCCGCAACCCTCTCTCTGTCGCCGGGAGAACGCGCCAC |
| | | TCTTTCCTGTCGGGCGTCCAAGAGCATCTCAAAGGACCTCGCCTGGTACCAGCAGAAGCCT |
| | | GGTCAAGCCCCGCGGCTGCTGATCTACTCCGGCTCCACGCTGCAATCAGGAATCCCAGCCA |
| | | GATTTTCCGGTTCGGGGTCGGGGACTGACTTCACCTTGACCATTAGCTCGCTGGAACCTGA |
| | | GGACTTCGCCGTGTATTACTGCCAGCAGCACAACAAGTACCCGTACACCTTCGGAGGCGGT |
| | | ACTAAGGTCGAGATCAAGGGGGGTGGCGGTAGCGGAGGAGGGGGCTCCGGCGGCGGCGGCT |
| | | CAGGGGGCGGAGGAAGCGAGGTGCAGCTGGTGCAGAGCGGAGCCGAGGTCAAGAAGCCTGG |
| | | AGAATCCCTGAGGATCAGCTGCAAAGGCAGCGGGTATACCTTCACCTCCTACTGGATGAAT |
| | | TGGGTCCGCCAGATGCCCGGAAAAGGCCTGGAGTGGATGGGACGGATTGACCCCTACGACT |
| | | CGGAAACCCATTACAACCAGAAGTTCAAGGATCACGTGACCATCTCCGTGGACAAGTCCAT |
| | | TTCCACTGCGTACCTCCAGTGGTCAAGCCTGAAGGCCTCCGACACTGCTATGTACTACTGC |
| | | GCACGCGGAAACTGGGATGATTACTGGGGACAGGGAACAACCGTGACTGTGTCCTCCACCA |
| | | CTACCCCAGCACCGAGGCCACCCACCCCGGCTCCTACCATCGCCTCCCAGCCTCTGTCCCT |
| | | GCGTCCGGAggcatgtagacccgcagctggtggggccgtgcatacccggggtcttgacttc |
| | | gcctgcgatatctacatttgggcccctctggctggtacttgcggggtcctgctgctttcac |
| | | tcgtgatcactctttactgtaagcgcggtcggaagaagctgctgtacatctttaagcaacc |
| | | cttcatgaggcctgtgcagactactcaagaggaggacggctgttcatgccggttcccagag |
| | | gaggaggaaggcggctgcgaactgcgcgtgaaattcagccgcagcgcagatgctccagcct |
| | | acaagcaggggcagaaccagctctacaacgaactcaatcttggtcggagagaggagtacga |
| | | cgtgctggacaagcggagaggacgggacccagaaatgggcgggaagccgcgcagaaagaat |
| | | ccccaagagggcctgtacaacgagctccaaaaggataagatggcagaagcctatagcgaga |
| | | ttggtatgaaaggggaacgcagaagaggcaaaggccacgacggactgtaccagggactcag |
| | | caccgccaccaaggacacctatgacgctcttcacatgcaggccctgccgcctcgg |
| hzCAR12 | 2146 | MALPVTALLLPLALLLHAARPEVVLTQSPATLSLSPGERATLSCRASKSISKDLAWYQQK |
| 3-22 AA | | PGQAPRLLIYSGSTLQSGIPARFSGSGSGTDFTLTISSLEPEDFAVYYCQQHNKYPYTFG |
| | | GGTKVEIKGGGGSGGGGSGGGGSGGGGSEVQLVQSGAEVKKPGESLRISCKGSGYTFTSY |
| | | WMNWVRQMPGKGLEWMGRIDPYDSETHYNQKFKDHVTISVDKSISTAYLQWSSLKASDTA |
| | | MYYCARGNWDDYWGQGTTVTVSSTTTPAPRPPTPAPTIASQPLSLRPEACRPAAGGAVHT |
| | | RGLDFACDIYIWAPLAGTCGVLLLSLVITLYCKRGRKKLLYIFKQPFMRPVQTTQEEDGC |
| | | SCRFPEEEEGGCELRVKFSRSADAPAYKQGQNQLYNELNLGRREEYDVLDKRRGRDPEMG |
| | | GKPRRKNPQEGLYNELQKDKMAEAYSEIGMKGERRRGKGHDGLYQGLSTATKDTYDALHM |
| | | QALPPR |
| hzCAR12 | 2205 | MALPVTALLLPLALLLHAARPEVVLTQSPATLSLSPGERATLSCRASKSISKDLAWYQQK |
| 3-22 | | PGQAPRLLIYSGSTLQSGIPARFSGSGSGTDFTLTISSLEPEDFAVYYCQQHNKYPYTFG |
| scFv | | GGTKVEIKGGGGSGGGGSGGGGSGGGGSEVQLVQSGAEVKKPGESLRISCKGSGYTFTSY |
| | | WMNWVRQMPGKGLEWMGRIDPYDSETHYNQKFKDHVTISVDKSISTAYLQWSSLKASDTA |
| | | MYYCARGNWDDYWGQGTTVTVSS |
| hzCAR12 | 2264 | EVQLVQSGAEVKKPGESLRISCKGSGYTFTSYWMNWVRQMPGKGLEWMGRIDPYDSETHYN |
| 3-22 VH | | QKFKDHVTISVDKSISTAYLQWSSLKASDTAMYYCARGNWDDYWGQGTTVTVSS |
| hzCAR12 | 2323 | EVVLTQSPATLSLSPGERATLSCRASKSISKDLAWYQQKPGQAPRLLIYSGSTLQSGIPAR |
| 3-22 VL | | FSGSGSGTDFTLTISSLEPEDFAVYYCQQHNKYPYTFGGGTKVEIK |
| hzCAR12 | 2088 | ATGGCCCTCCCTGTCACCGCCCTGCTGCTTCCGCTGGCTCTTCTGCTCCACGCCGCTCGGC |
| 3-23 NT | | CCGACGTCGTGATGACCCAGTCACCGGCATTCCTGTCCGTGACTCCCGGAGAAAAGGTCAC |
| | | GATTACTTGCCGGGCGTCCAAGAGCATCTCCAAGGACCTCGCCTGGTACCAACAGAAGCCG |
| | | GACCAGGCCCCTAAGCTGTTGATCTACTCGGGGTCCACCCTTCAATCGGGAGTGCCATCGC |
| | | GGTTTAGCGGTTCGGGTTCTGGGACCGACTTCACTTTCACCATCTCCTCACTGGAAGCCGA |
| | | GGATGCCGCCACTTACTACTGTCAGCAGCACAACAAGTATCCGTACACCTTCGGAGGCGGT |
| | | ACCAAAGTGGAGATCAAGGGGGGTGGCGGTAGCGGAGGAGGGGGCTCCGGCGGCGGCGGCT |
| | | CAGGGGGCGGAGGAAGCGAGGTGCAGCTGGTGCAGAGCGGAGCCGAGGTCAAGAAGCCTGG |
| | | AGAATCCCTGAGGATCAGCTGCAAAGGCAGCGGGTATACCTTCACCTCCTACTGGATGAAT |
| | | TGGGTCCGCCAGATGCCCGGAAAAGGCCTGGAGTGGATGGGACGGATTGACCCCTACGACT |
| | | CGGAAACCCATTACAACCAGAAGTTCAAGGATCACGTGACCATCTCCGTGGACAAGTCCAT |
| | | TTCCACTGCGTACCTCCAGTGGTCAAGCCTGAAGGCCTCCGACACTGCTATGTACTACTGC |
| | | GCACGCGGAAACTGGGATGATTACTGGGGACAGGGAACAACCGTGACTGTGTCCTCCACCA |
| | | CTACCCCAGCACCGAGGCCACCCACCCCGGCTCCTACCATCGCCTCCCAGCCTCTGTCCCT |
| | | GCGTCCGGAggcatgtagacccgcagctggtggggccgtgcatacccggggtcttgacttc |
| | | gcctgcgatatctacatttgggcccctctggctggtacttgcggggtcctgctgctttcac |
| | | tcgtgatcactctttactgtaagcgcggtcggaagaagctgctgtacatctttaagcaacc |
| | | cttcatgaggcctgtgcagactactcaagaggaggacggctgttcatgccggttcccagag |
| | | gaggaggaaggcggctgcgaactgcgcgtgaaattcagccgcagcgcagatgctccagcct |
| | | acaagcaggggcagaaccagctctacaacgaactcaatcttggtcggagagaggagtacga |
| | | cgtgctggacaagcggagaggacgggacccagaaatgggcgggaagccgcgcagaaagaat |
| | | ccccaagagggcctgtacaacgagctccaaaaggataagatggcagaagcctatagcgaga |
| | | ttggtatgaaaggggaacgcagaagaggcaaaggccacgacggactgtaccagggactcag |
| | | caccgccaccaaggacacctatgacgctcttcacatgcaggccctgccgcctcgg |
| hzCAR12 | 2147 | MALPVTALLLPLALLLHAARPDVVMTQSPAFLSVTPGEKVTITCRASKSISKDLAWYQQK |
| 3-23 AA | | PDQAPKLLIYSGSTLQSGVPSRFSGSGSGTDFTFTISSLEAEDAATYYCQQHNKYPYTFG |
| | | GGTKVEIKGGGGSGGGGSGGGGSGGGGSEVQLVQSGAEVKKPGESLRISCKGSGYTFTSY |
| | | WMNWVRQMPGKGLEWMGRIDPYDSETHYNQKFKDHVTISVDKSISTAYLQWSSLKASDTA |
| | | MYYCARGNWDDYWGQGTTVTVSSTTTPAPRPPTPAPTIASQPLSLRPEACRPAAGGAVHT |
| | | RGLDFACDIYIWAPLAGTCGVLLLSLVITLYCKRGRKKLLYIFKQPFMRPVQTTQEEDGC |
| | | SCRFPEEEEGGCELRVKFSRSADAPAYKQGQNQLYNELNLGRREEYDVLDKRRGRDPEMG |
| | | GKPRRKNPQEGLYNELQKDKMAEAYSEIGMKGERRRGKGHDGLYQGLSTATKDTYDALHM |
| | | QALPPR |
| hzCAR12 | 2206 | MALPVTALLLPLALLLHAARPDVVMTQSPAFLSVTPGEKVTITCRASKSISKDLAWYQQK |
| 3-23 | | PDQAPKLLIYSGSTLQSGVPSRFSGSGSGTDFTFTISSLEAEDAATYYCQQHNKYPYTFG |
| scFv | | GGTKVEIKGGGGSGGGGSGGGGSGGGGSEVQLVQSGAEVKKPGESLRISCKGSGYTFTSY |
| | | WMNWVRQMPGKGLEWMGRIDPYDSETHYNQKFKDHVTISVDKSISTAYLQWSSLKASDTA |
| | | MYYCARGNWDDYWGQGTTVTVSS |
| hzCAR12 | 2265 | EVQLVQSGAEVKKPGESLRISCKGSGYTFTSYWMNWVRQMPGKGLEWMGRIDPYDSETHYN |
| 3-23 VH | | QKFKDHVTISVDKSISTAYLQWSSLKASDTAMYYCARGNWDDYWGQGTTVTVSS |
| hzCAR12 | 2324 | DVVMTQSPAFLSVTPGEKVTITCRASKSISKDLAWYQQKPDQAPKLLIYSGSTLQSGVPSR |
| 3-23 VL | | FSGSGSGTDFTFTISSLEAEDAATYYCQQHNKYPYTFGGGTKVEIK |
| hzCAR12 | 2089 | ATGGCCCTCCCTGTCACCGCCCTGCTGCTTCCGCTGGCTCTTCTGCTCCACGCCGCTCGGC |
| 3-24 NT | | CCGACGTGGTCATGACTCAGTCCCCGGACTCACTCGCGGTGTCGCTTGGAGAGAGAGCGAC |
| | | CATCAACTGTCGGGCCTCAAAGAGCATCAGCAAGGACCTGGCCTGGTACCAGCAGAAGCCG |
| | | GGACAGCCGCCAAAGCTGCTGATCTACTCCGGGTCCACCTTGCAATCTGGTGTCCCTGACC |
| | | GGTTCTCCGGTTCCGGGTCGGGTACCGACTTCACGCTCACTATTTCGTCGCTGCAAGCCGA |
| | | AGATGTGGCCGTGTACTATTGCCAACAGCACAACAAGTACCCCTACACTTTTGGCGGAGGC |
| | | ACCAAGGTGGAAATCAAGGGGGGTGGCGGTAGCGGAGGAGGGGGCTCCGGCGGCGGCGGCT |
| | | CAGGGGGCGGAGGAAGCGAGGTGCAGCTGGTGCAGAGCGGAGCCGAGGTCAAGAAGCCTGG |
| | | AGAATCCCTGAGGATCAGCTGCAAAGGCAGCGGGTATACCTTCACCTCCTACTGGATGAAT |
| | | TGGGTCCGCCAGATGCCCGGAAAAGGCCTGGAGTGGATGGGACGGATTGACCCCTACGACT |
| | | CGGAAACCCATTACAACCAGAAGTTCAAGGATCACGTGACCATCTCCGTGGACAAGTCCAT |
| | | TTCCACTGCGTACCTCCAGTGGTCAAGCCTGAAGGCCTCCGACACTGCTATGTACTACTGC |
| | | GCACGCGGAAACTGGGATGATTACTGGGGACAGGGAACAACCGTGACTGTGTCCTCCACCA |
| | | CTACCCCAGCACCGAGGCCACCCACCCCGGCTCCTACCATCGCCTCCCAGCCTCTGTCCCT |
| | | GCGTCCGGAggcatgtagacccgcagctggtggggccgtgcatacccggggtcttgacttc |
| | | gcctgcgatatctacatttgggcccctctggctggtacttgcggggtcctgctgctttcac |
| | | tcgtgatcactctttactgtaagcgcggtcggaagaagctgctgtacatctttaagcaacc |
| | | cttcatgaggcctgtgcagactactcaagaggaggacggctgttcatgccggttcccagag |
| | | gaggaggaaggcggctgcgaactgcgcgtgaaattcagccgcagcgcagatgctccagcct |
| | | acaagcaggggcagaaccagctctacaacgaactcaatcttggtcggagagaggagtacga |
| | | cgtgctggacaagcggagaggacgggacccagaaatgggcgggaagccgcgcagaaagaat |
| | | ccccaagagggcctgtacaacgagctccaaaaggataagatggcagaagcctatagcgaga |
| | | ttggtatgaaaggggaacgcagaagaggcaaaggccacgacggactgtaccagggactcag |
| | | caccgccaccaaggacacctatgacgctcttcacatgcaggccctgccgcctcgg |
| hzCAR12 | 2148 | MALPVTALLLPLALLLHAARPDVVMTQSPDSLAVSLGERATINCRASKSISKDLAWYQQK |
| 3-24 AA | | PGQPPKLLIYSGSTLQSGVPDRFSGSGSGTDFTLTISSLQAEDVAVYYCQQHNKYPYTFG |
| | | GGTKVEIKGGGGSGGGGSGGGGSGGGGSEVQLVQSGAEVKKPGESLRISCKGSGYTFTSY |
| | | WMNWVRQMPGKGLEWMGRIDPYDSETHYNQKFKDHVTISVDKSISTAYLQWSSLKASDTA |
| | | MYYCARGNWDDYWGQGTTVTVSSTTTPAPRPPTPAPTIASQPLSLRPEACRPAAGGAVHT |
| | | RGLDFACDIYIWAPLAGTCGVLLLSLVITLYCKRGRKKLLYIFKQPFMRPVQTTQEEDGC |
| | | SCRFPEEEEGGCELRVKFSRSADAPAYKQGQNQLYNELNLGRREEYDVLDKRRGRDPEMG |
| | | GKPRRKNPQEGLYNELQKDKMAEAYSEIGMKGERRRGKGHDGLYQGLSTATKDTYDALHM |
| | | QALPPR |
| hzCAR12 | 2207 | MALPVTALLLPLALLLHAARPDVVMTQSPDSLAVSLGERATINCRASKSISKDLAWYQQK |
| 3-24 | | PGQPPKLLIYSGSTLQSGVPDRFSGSGSGTDFTLTISSLQAEDVAVYYCQQHNKYPYTFG |
| scFv | | GGTKVEIKGGGGSGGGGSGGGGSGGGGSEVQLVQSGAEVKKPGESLRISCKGSGYTFTSY |
| | | WMNWVRQMPGKGLEWMGRIDPYDSETHYNQKFKDHVTISVDKSISTAYLQWSSLKASDTA |
| | | MYYCARGNWDDYWGQGTTVTVSS |
| hzCAR12 | 2266 | EVQLVQSGAEVKKPGESLRISCKGSGYTFTSYWMNWVRQMPGKGLEWMGRIDPYDSETHYN |
| 3-24 VH | | QKFKDHVTISVDKSISTAYLQWSSLKASDTAMYYCARGNWDDYWGQGTTVTVSS |
| hzCAR12 | 2325 | DVVMTQSPDSLAVSLGERATINCRASKSISKDLAWYQQKPGQPPKLLIYSGSTLQSGVPDR |
| 3-24 VL | | FSGSGSGTDFTLTISSLQAEDVAVYYCQQHNKYPYTFGGGTKVEIK |
| hzCAR12 | 2090 | ATGGCCCTCCCTGTCACCGCCCTGCTGCTTCCGCTGGCTCTTCTGCTCCACGCCGCTCGGC |
| 3-25 NT | | CCGAAGTGCAGCTCGTCGAGAGCGGAGGGGGACTGGTGCAGCCCGGAGGAAGCCTGAGGCT |
| | | GTCCTGCGCTGCCTCCGGCTACACCTTCACCTCCTACTGGATGAACTGGGTCAGACAGGCA |
| | | CCTGGAAAGGGACTGGTCTGGGTGTCGCGCATTGACCCCTACGACTCCGAAACCCATTACA |
| | | ATCAGAAATTCAAGGACCGCTTCACCATCTCCGTGGACAAAGCCAAGAGCACCGCGTACCT |
| | | CCAAATGAACTCCCTGCGCGCTGAGGATACAGCAGTGTACTATTGCGCCCGGGGAAACTGG |
| | | GATGATTACTGGGGCCAGGGAACTACTGTGACTGTGTCATCCGGGGGTGGCGGTAGCGGAG |
| | | GAGGGGGCTCCGGCGGCGGCGGCTCAGGGGGCGGAGGAAGCGACGTGCAGCTCACCCAGTC |
| | | GCCCTCATTTCTGTCGGCCTCAGTGGGAGACAGAGTGACCATTACTTGTCGGGCCTCCAAG |
| | | AGCATCTCCAAGGACCTGGCCTGGTATCAGCAGAAGCCAGGAAAGGCGCCTAAGTTGCTCA |
| | | TCTACTCGGGGTCGACCCTGCAATCTGGCGTGCCGTCCCGGTTCTCCGGTTCGGGAAGCGG |
| | | TACCGAATTCACCCTTACTATCTCCTCCCTGCAACCGGAGGACTTCGCCACCTACTACTGC |
| | | CAACAGCACAACAAGTACCCGTACACTTTCGGGGGTGGCACGAAGGTCGAAATCAAGACCA |
| | | CTACCCCAGCACCGAGGCCACCCACCCCGGCTCCTACCATCGCCTCCCAGCCTCTGTCCCT |
| | | GCGTCCGGAggcatgtagacccgcagctggtggggccgtgcatacccggggtcttgacttc |
| | | gcctgcgatatctacatttgggcccctctggctggtacttgcggggtcctgctgctttcac |
| | | tcgtgatcactctttactgtaagcgcggtcggaagaagctgctgtacatctttaagcaacc |
| | | cttcatgaggcctgtgcagactactcaagaggaggacggctgttcatgccggttcccagag |
| | | gaggaggaaggcggctgcgaactgcgcgtgaaattcagccgcagcgcagatgctccagcct |
| | | acaagcaggggcagaaccagctctacaacgaactcaatcttggtcggagagaggagtacga |
| | | cgtgctggacaagcggagaggacgggacccagaaatgggcgggaagccgcgcagaaagaat |
| | | ccccaagagggcctgtacaacgagctccaaaaggataagatggcagaagcctatagcgaga |
| | | ttggtatgaaaggggaacgcagaagaggcaaaggccacgacggactgtaccagggactcag |
| | | caccgccaccaaggacacctatgacgctcttcacatgcaggccctgccgcctcgg |
| hzCAR12 | 2149 | MALPVTALLLPLALLLHAARPEVQLVESGGGLVQPGGSLRLSCAASGYTFTSYWMNWVRQ |
| 3-25 AA | | APGKGLVWVSRIDPYDSETHYNQKFKDRFTISVDKAKSTAYLQMNSLRAEDTAVYYCARG |
| | | NWDDYWGQGTTVTVSSGGGGSGGGGSGGGGSGGGGSDVQLTQSPSFLSASVGDRVTITCR |
| | | ASKSISKDLAWYQQKPGKAPKLLIYSGSTLQSGVPSRFSGSGSGTEFTLTISSLQPEDFA |
| | | TYYCQQHNKYPYTFGGGTKVEIKTTTPAPRPPTPAPTIASQPLSLRPEACRPAAGGAVHT |
| | | RGLDFACDIYIWAPLAGTCGVLLLSLVITLYCKRGRKKLLYIFKQPFMRPVQTTQEEDGC |
| | | SCRFPEEEEGGCELRVKFSRSADAPAYKQGQNQLYNELNLGRREEYDVLDKRRGRDPEMG |
| | | GKPRRKNPQEGLYNELQKDKMAEAYSEIGMKGERRRGKGHDGLYQGLSTATKDTYDALHM |
| | | QALPPR |
| hzCAR12 | 2208 | MALPVTALLLPLALLLHAARPEVQLVESGGGLVQPGGSLRLSCAASGYTFTSYWMNWVRQ |
| 3-25 | | APGKGLVWVSRIDPYDSETHYNQKFKDRFTISVDKAKSTAYLQMNSLRAEDTAVYYCARG |
| scFv | | NWDDYWGQGTTVTVSSGGGGSGGGGSGGGGSGGGGSDVQLTQSPSFLSASVGDRVTITCR |
| | | ASKSISKDLAWYQQKPGKAPKLLIYSGSTLQSGVPSRFSGSGSGTEFTLTISSLQPEDFA |
| | | TYYCQQHNKYPYTFGGGTKVEIK |
| hzCAR12 | 2267 | EVQLVESGGGLVQPGGSLRLSCAASGYTFTSYWMNWVRQAPGKGLVWVSRIDPYDSETHYN |
| 3-25 VH | | QKFKDRFTISVDKAKSTAYLQMNSLRAEDTAVYYCARGNWDDYWGQGTTVTVSS |
| hzCAR12 | 2326 | DVQLTQSPSFLSASVGDRVTITCRASKSISKDLAWYQQKPGKAPKLLIYSGSTLQSGVPSR |
| 3-25 VL | | FSGSGSGTEFTLTISSLQPEDFATYYCQQHNKYPYTFGGGTKVEIK |
| hzCAR12 | 2091 | ATGGCCCTCCCTGTCACCGCCCTGCTGCTTCCGCTGGCTCTTCTGCTCCACGCCGCTCGGC |
| 3-26 NT | | CCGAAGTGCAGCTCGTCGAGAGCGGAGGGGGACTGGTGCAGCCCGGAGGAAGCCTGAGGCT |
| | | GTCCTGCGCTGCCTCCGGCTACACCTTCACCTCCTACTGGATGAACTGGGTCAGACAGGCA |
| | | CCTGGAAAGGGACTGGTCTGGGTGTCGCGCATTGACCCCTACGACTCCGAAACCCATTACA |
| | | ATCAGAAATTCAAGGACCGCTTCACCATCTCCGTGGACAAAGCCAAGAGCACCGCGTACCT |
| | | CCAAATGAACTCCCTGCGCGCTGAGGATACAGCAGTGTACTATTGCGCCCGGGGAAACTGG |
| | | GATGATTACTGGGGCCAGGGAACTACTGTGACTGTGTCATCCGGGGGTGGCGGTAGCGGAG |
| | | GAGGGGGCTCCGGCGGCGGCGGCTCAGGGGGCGGAGGAAGCGAAGTGGTGCTGACCCAGTC |
| | | GCCCGCAACCCTCTCTCTGTCGCCGGGAGAACGCGCCACTCTTTCCTGTCGGGCGTCCAAG |
| | | AGCATCTCAAAGGACCTCGCCTGGTACCAGCAGAAGCCTGGTCAAGCCCCGCGGCTGCTGA |
| | | TCTACTCCGGCTCCACGCTGCAATCAGGAATCCCAGCCAGATTTTCCGGTTCGGGGTCGGG |
| | | GACTGACTTCACCTTGACCATTAGCTCGCTGGAACCTGAGGACTTCGCCGTGTATTACTGC |
| | | CAGCAGCACAACAAGTACCCGTACACCTTCGGAGGCGGTACTAAGGTCGAGATCAAGACCA |
| | | CTACCCCAGCACCGAGGCCACCCACCCCGGCTCCTACCATCGCCTCCCAGCCTCTGTCCCT |
| | | GCGTCCGGAggcatgtagacccgcagctggtggggccgtgcatacccggggtcttgacttc |
| | | gcctgcgatatctacatttgggcccctctggctggtacttgcggggtcctgctgctttcac |
| | | tcgtgatcactctttactgtaagcgcggtcggaagaagctgctgtacatctttaagcaacc |
| | | cttcatgaggcctgtgcagactactcaagaggaggacggctgttcatgccggttcccagag |
| | | gaggaggaaggcggctgcgaactgcgcgtgaaattcagccgcagcgcagatgctccagcct |
| | | acaagcaggggcagaaccagctctacaacgaactcaatcttggtcggagagaggagtacga |
| | | cgtgctggacaagcggagaggacgggacccagaaatgggcgggaagccgcgcagaaagaat |
| | | ccccaagagggcctgtacaacgagctccaaaaggataagatggcagaagcctatagcgaga |
| | | ttggtatgaaaggggaacgcagaagaggcaaaggccacgacggactgtaccagggactcag |
| | | caccgccaccaaggacacctatgacgctcttcacatgcaggccctgccgcctcgg |
| hzCAR12 | 2150 | MALPVTALLLPLALLLHAARPEVQLVESGGGLVQPGGSLRLSCAASGYTFTSYWMNWVRQ |
| 3-26 AA | | APGKGLVWVSRIDPYDSETHYNQKFKDRFTISVDKAKSTAYLQMNSLRAEDTAVYYCARG |
| | | NWDDYWGQGTTVTVSSGGGGSGGGGSGGGGSGGGGSEVVLTQSPATLSLSPGERATLSCR |
| | | ASKSISKDLAWYQQKPGQAPRLLIYSGSTLQSGIPARFSGSGSGTDFTLTISSLEPEDFA |
| | | VYYCQQHNKYPYTFGGGTKVEIKTTTPAPRPPTPAPTIASQPLSLRPEACRPAAGGAVHT |
| | | RGLDFACDIYIWAPLAGTCGVLLLSLVITLYCKRGRKKLLYIFKQPFMRPVQTTQEEDGC |
| | | SCRFPEEEEGGCELRVKFSRSADAPAYKQGQNQLYNELNLGRREEYDVLDKRRGRDPEMG |
| | | GKPRRKNPQEGLYNELQKDKMAEAYSEIGMKGERRRGKGHDGLYQGLSTATKDTYDALHM |
| | | QALPPR |
| hzCAR12 | 2209 | MALPVTALLLPLALLLHAARPEVQLVESGGGLVQPGGSLRLSCAASGYTFTSYWMNWVRQ |
| 3-26 | | APGKGLVWVSRIDPYDSETHYNQKFKDRFTISVDKAKSTAYLQMNSLRAEDTAVYYCARG |
| scFv | | NWDDYWGQGTTVTVSSGGGGSGGGGSGGGGSGGGGSEVVLTQSPATLSLSPGERATLSCR |
| | | ASKSISKDLAWYQQKPGQAPRLLIYSGSTLQSGIPARFSGSGSGTDFTLTISSLEPEDFA |
| | | VYYCQQHNKYPYTFGGGTKVEIK |
| hzCAR12 | 2268 | EVQLVESGGGLVQPGGSLRLSCAASGYTFTSYWMNWVRQAPGKGLVWVSRIDPYDSETHYN |
| 3-26 VH | | QKFKDRFTISVDKAKSTAYLQMNSLRAEDTAVYYCARGNWDDYWGQGTTVTVSS |
| hzCAR12 | 2327 | EVVLTQSPATLSLSPGERATLSCRASKSISKDLAWYQQKPGQAPRLLIYSGSTLQSGIPAR |
| 3-26 VL | | FSGSGSGTDFTLTISSLEPEDFAVYYCQQHNKYPYTFGGGTKVEIK |
| hzCAR12 | 2092 | ATGGCCCTCCCTGTCACCGCCCTGCTGCTTCCGCTGGCTCTTCTGCTCCACGCCGCTCGGC |
| 3-27 NT | | CCGAAGTGCAGCTCGTCGAGAGCGGAGGGGGACTGGTGCAGCCCGGAGGAAGCCTGAGGCT |
| | | GTCCTGCGCTGCCTCCGGCTACACCTTCACCTCCTACTGGATGAACTGGGTCAGACAGGCA |
| | | CCTGGAAAGGGACTGGTCTGGGTGTCGCGCATTGACCCCTACGACTCCGAAACCCATTACA |
| | | ATCAGAAATTCAAGGACCGCTTCACCATCTCCGTGGACAAAGCCAAGAGCACCGCGTACCT |
| | | CCAAATGAACTCCCTGCGCGCTGAGGATACAGCAGTGTACTATTGCGCCCGGGGAAACTGG |
| | | GATGATTACTGGGGCCAGGGAACTACTGTGACTGTGTCATCCGGGGGTGGCGGTAGCGGAG |
| | | GAGGGGGCTCCGGCGGCGGCGGCTCAGGGGGCGGAGGAAGCGACGTCGTGATGACCCAGTC |
| | | ACCGGCATTCCTGTCCGTGACTCCCGGAGAAAAGGTCACGATTACTTGCCGGGCGTCCAAG |
| | | AGCATCTCCAAGGACCTCGCCTGGTACCAACAGAAGCCGGACCAGGCCCCTAAGCTGTTGA |
| | | TCTACTCGGGGTCCACCCTTCAATCGGGAGTGCCATCGCGGTTTAGCGGTTCGGGTTCTGG |
| | | GACCGACTTCACTTTCACCATCTCCTCACTGGAAGCCGAGGATGCCGCCACTTACTACTGT |
| | | CAGCAGCACAACAAGTATCCGTACACCTTCGGAGGCGGTACCAAAGTGGAGATCAAGACCA |
| | | CTACCCCAGCACCGAGGCCACCCACCCCGGCTCCTACCATCGCCTCCCAGCCTCTGTCCCT |
| | | GCGTCCGGAggcatgtagacccgcagctggtggggccgtgcatacccggggtcttgacttc |
| | | gcctgcgatatctacatttgggcccctctggctggtacttgcggggtcctgctgctttcac |
| | | tcgtgatcactctttactgtaagcgcggtcggaagaagctgctgtacatctttaagcaacc |
| | | cttcatgaggcctgtgcagactactcaagaggaggacggctgttcatgccggttcccagag |
| | | gaggaggaaggcggctgcgaactgcgcgtgaaattcagccgcagcgcagatgctccagcct |
| | | acaagcaggggcagaaccagctctacaacgaactcaatcttggtcggagagaggagtacga |
| | | cgtgctggacaagcggagaggacgggacccagaaatgggcgggaagccgcgcagaaagaat |
| | | ccccaagagggcctgtacaacgagctccaaaaggataagatggcagaagcctatagcgaga |
| | | ttggtatgaaaggggaacgcagaagaggcaaaggccacgacggactgtaccagggactcag |
| | | caccgccaccaaggacacctatgacgctcttcacatgcaggccctgccgcctcgg |
| hzCAR12 | 2151 | MALPVTALLLPLALLLHAARPEVQLVESGGGLVQPGGSLRLSCAASGYTFTSYWMNWVRQ |
| 3-27 AA | | APGKGLVWVSRIDPYDSETHYNQKFKDRFTISVDKAKSTAYLQMNSLRAEDTAVYYCARG |
| | | NWDDYWGQGTTVTVSSGGGGSGGGGSGGGGSGGGGSDVVMTQSPAFLSVTPGEKVTITCR |
| | | ASKSISKDLAWYQQKPDQAPKLLIYSGSTLQSGVPSRFSGSGSGTDFTFTISSLEAEDAA |
| | | TYYCQQHNKYPYTFGGGTKVEIKTTTPAPRPPTPAPTIASQPLSLRPEACRPAAGGAVHT |
| | | RGLDFACDIYIWAPLAGTCGVLLLSLVITLYCKRGRKKLLYIFKQPFMRPVQTTQEEDGC |
| | | SCRFPEEEEGGCELRVKFSRSADAPAYKQGQNQLYNELNLGRREEYDVLDKRRGRDPEMG |
| | | GKPRRKNPQEGLYNELQKDKMAEAYSEIGMKGERRRGKGHDGLYQGLSTATKDTYDALHM |
| | | QALPPR |
| hzCAR12 | 2210 | MALPVTALLLPLALLLHAARPEVQLVESGGGLVQPGGSLRLSCAASGYTFTSYWMNWVRQ |
| 3-27 | | APGKGLVWVSRIDPYDSETHYNQKFKDRFTISVDKAKSTAYLQMNSLRAEDTAVYYCARG |
| scFv | | NWDDYWGQGTTVTVSSGGGGSGGGGSGGGGSGGGGSDVVMTQSPAFLSVTPGEKVTITCR |
| | | ASKSISKDLAWYQQKPDQAPKLLIYSGSTLQSGVPSRFSGSGSGTDFTFTISSLEAEDAA |
| | | TYYCQQHNKYPYTFGGGTKVEIK |
| hzCAR12 | 2269 | EVQLVESGGGLVQPGGSLRLSCAASGYTFTSYWMNWVRQAPGKGLVWVSRIDPYDSETHYN |
| 3-27 VH | | QKFKDRFTISVDKAKSTAYLQMNSLRAEDTAVYYCARGNWDDYWGQGTTVTVSS |
| hzCAR12 | 2328 | DVVMTQSPAFLSVTPGEKVTITCRASKSISKDLAWYQQKPDQAPKLLIYSGSTLQSGVPSR |
| 3-27 VL | | FSGSGSGTDFTFTISSLEAEDAATYYCQQHNKYPYTFGGGTKVEIK |
| hzCAR12 | 2093 | ATGGCCCTCCCTGTCACCGCCCTGCTGCTTCCGCTGGCTCTTCTGCTCCACGCCGCTCGGC |
| 3-28 NT | | CCGAAGTGCAGCTCGTCGAGAGCGGAGGGGGACTGGTGCAGCCCGGAGGAAGCCTGAGGCT |
| | | GTCCTGCGCTGCCTCCGGCTACACCTTCACCTCCTACTGGATGAACTGGGTCAGACAGGCA |
| | | CCTGGAAAGGGACTGGTCTGGGTGTCGCGCATTGACCCCTACGACTCCGAAACCCATTACA |
| | | ATCAGAAATTCAAGGACCGCTTCACCATCTCCGTGGACAAAGCCAAGAGCACCGCGTACCT |
| | | CCAAATGAACTCCCTGCGCGCTGAGGATACAGCAGTGTACTATTGCGCCCGGGGAAACTGG |
| | | GATGATTACTGGGGCCAGGGAACTACTGTGACTGTGTCATCCGGGGGTGGCGGTAGCGGAG |
| | | GAGGGGGCTCCGGCGGCGGCGGCTCAGGGGGCGGAGGAAGCGACGTGGTCATGACTCAGTC |
| | | CCCGGACTCACTCGCGGTGTCGCTTGGAGAGAGAGCGACCATCAACTGTCGGGCCTCAAAG |
| | | AGCATCAGCAAGGACCTGGCCTGGTACCAGCAGAAGCCGGGACAGCCGCCAAAGCTGCTGA |
| | | TCTACTCCGGGTCCACCTTGCAATCTGGTGTCCCTGACCGGTTCTCCGGTTCCGGGTCGGG |
| | | TACCGACTTCACGCTCACTATTTCGTCGCTGCAAGCCGAAGATGTGGCCGTGTACTATTGC |
| | | CAACAGCACAACAAGTACCCCTACACTTTTGGCGGAGGCACCAAGGTGGAAATCAAGACCA |
| | | CTACCCCAGCACCGAGGCCACCCACCCCGGCTCCTACCATCGCCTCCCAGCCTCTGTCCCT |
| | | GCGTCCGGAggcatgtagacccgcagctggtggggccgtgcatacccggggtcttgacttc |
| | | gcctgcgatatctacatttgggcccctctggctggtacttgcggggtcctgctgctttcac |
| | | tcgtgatcactctttactgtaagcgcggtcggaagaagctgctgtacatctttaagcaacc |
| | | cttcatgaggcctgtgcagactactcaagaggaggacggctgttcatgccggttcccagag |
| | | gaggaggaaggcggctgcgaactgcgcgtgaaattcagccgcagcgcagatgctccagcct |
| | | acaagcaggggcagaaccagctctacaacgaactcaatcttggtcggagagaggagtacga |
| | | cgtgctggacaagcggagaggacgggacccagaaatgggcgggaagccgcgcagaaagaat |
| | | ccccaagagggcctgtacaacgagctccaaaaggataagatggcagaagcctatagcgaga |
| | | ttggtatgaaaggggaacgcagaagaggcaaaggccacgacggactgtaccagggactcag |
| | | caccgccaccaaggacacctatgacgctcttcacatgcaggccctgccgcctcgg |
| hzCAR12 | 2152 | MALPVTALLLPLALLLHAARPEVQLVESGGGLVQPGGSLRLSCAASGYTFTSYWMNWVRQ |
| 3-28 AA | | APGKGLVWVSRIDPYDSETHYNQKFKDRFTISVDKAKSTAYLQMNSLRAEDTAVYYCARG |
| | | NWDDYWGQGTTVTVSSGGGGSGGGGSGGGGSGGGGSDVVMTQSPDSLAVSLGERATINCR |
| | | ASKSISKDLAWYQQKPGQPPKLLIYSGSTLQSGVPDRFSGSGSGTDFTLTISSLQAEDVA |
| | | VYYCQQHNKYPYTFGGGTKVEIKTTTPAPRPPTPAPTIASQPLSLRPEACRPAAGGAVHT |
| | | RGLDFACDIYIWAPLAGTCGVLLLSLVITLYCKRGRKKLLYIFKQPFMRPVQTTQEEDGC |
| | | SCRFPEEEEGGCELRVKFSRSADAPAYKQGQNQLYNELNLGRREEYDVLDKRRGRDPEMG |
| | | GKPRRKNPQEGLYNELQKDKMAEAYSEIGMKGERRRGKGHDGLYQGLSTATKDTYDALHM |
| | | QALPPR |
| hzCAR12 | 2211 | MALPVTALLLPLALLLHAARPEVQLVESGGGLVQPGGSLRLSCAASGYTFTSYWMNWVRQ |
| 3-28 | | APGKGLVWVSRIDPYDSETHYNQKFKDRFTISVDKAKSTAYLQMNSLRAEDTAVYYCARG |
| scFv | | NWDDYWGQGTTVTVSSGGGGSGGGGSGGGGSGGGGSDVVMTQSPDSLAVSLGERATINCR |
| | | ASKSISKDLAWYQQKPGQPPKLLIYSGSTLQSGVPDRFSGSGSGTDFTLTISSLQAEDVA |
| | | VYYCQQHNKYPYTFGGGTKVEIK |
| hzCAR12 | 2270 | EVQLVESGGGLVQPGGSLRLSCAASGYTFTSYWMNWVRQAPGKGLVWVSRIDPYDSETHYN |
| 3-28 VH | | QKFKDRFTISVDKAKSTAYLQMNSLRAEDTAVYYCARGNWDDYWGQGTTVTVSS |
| hzCAR12 | 2329 | DVVMTQSPDSLAVSLGERATINCRASKSISKDLAWYQQKPGQPPKLLIYSGSTLQSGVPDR |
| 3-28 VL | | FSGSGSGTDFTLTISSLQAEDVAVYYCQQHNKYPYTFGGGTKVEIK |
| hzCAR12 | 2094 | ATGGCCCTCCCTGTCACCGCCCTGCTGCTTCCGCTGGCTCTTCTGCTCCACGCCGCTCGGC |
| 3-29 NT | | CCGACGTGCAGCTCACCCAGTCGCCCTCATTTCTGTCGGCCTCAGTGGGAGACAGAGTGAC |
| | | CATTACTTGTCGGGCCTCCAAGAGCATCTCCAAGGACCTGGCCTGGTATCAGCAGAAGCCA |
| | | GGAAAGGCGCCTAAGTTGCTCATCTACTCGGGGTCGACCCTGCAATCTGGCGTGCCGTCCC |
| | | GGTTCTCCGGTTCGGGAAGCGGTACCGAATTCACCCTTACTATCTCCTCCCTGCAACCGGA |
| | | GGACTTCGCCACCTACTACTGCCAACAGCACAACAAGTACCCGTACACTTTCGGGGGTGGC |
| | | ACGAAGGTCGAAATCAAGGGGGGTGGCGGTAGCGGAGGAGGGGGCTCCGGCGGCGGCGGCT |
| | | CAGGGGGCGGAGGAAGCGAAGTGCAGCTCGTCGAGAGCGGAGGGGGACTGGTGCAGCCCGG |
| | | AGGAAGCCTGAGGCTGTCCTGCGCTGCCTCCGGCTACACCTTCACCTCCTACTGGATGAAC |
| | | TGGGTCAGACAGGCACCTGGAAAGGGACTGGTCTGGGTGTCGCGCATTGACCCCTACGACT |
| | | CCGAAACCCATTACAATCAGAAATTCAAGGACCGCTTCACCATCTCCGTGGACAAAGCCAA |
| | | GAGCACCGCGTACCTCCAAATGAACTCCCTGCGCGCTGAGGATACAGCAGTGTACTATTGC |
| | | GCCCGGGGAAACTGGGATGATTACTGGGGCCAGGGAACTACTGTGACTGTGTCATCCACCA |
| | | CTACCCCAGCACCGAGGCCACCCACCCCGGCTCCTACCATCGCCTCCCAGCCTCTGTCCCT |
| | | GCGTCCGGAggcatgtagacccgcagctggtggggccgtgcatacccggggtcttgacttc |
| | | gcctgcgatatctacatttgggcccctctggctggtacttgcggggtcctgctgctttcac |
| | | tcgtgatcactctttactgtaagcgcggtcggaagaagctgctgtacatctttaagcaacc |
| | | cttcatgaggcctgtgcagactactcaagaggaggacggctgttcatgccggttcccagag |
| | | gaggaggaaggcggctgcgaactgcgcgtgaaattcagccgcagcgcagatgctccagcct |
| | | acaagcaggggcagaaccagctctacaacgaactcaatcttggtcggagagaggagtacga |
| | | cgtgctggacaagcggagaggacgggacccagaaatgggcgggaagccgcgcagaaagaat |
| | | ccccaagagggcctgtacaacgagctccaaaaggataagatggcagaagcctatagcgaga |
| | | ttggtatgaaaggggaacgcagaagaggcaaaggccacgacggactgtaccagggactcag |
| | | caccgccaccaaggacacctatgacgctcttcacatgcaggccctgccgcctcgg |
| hzCAR12 | 2153 | MALPVTALLLPLALLLHAARPDVQLTQSPSFLSASVGDRVTITCRASKSISKDLAWYQQK |
| 3-29 AA | | PGKAPKLLIYSGSTLQSGVPSRFSGSGSGTEFTLTISSLQPEDFATYYCQQHNKYPYTFG |
| | | GGTKVEIKGGGGSGGGGSGGGGSGGGGSEVQLVESGGGLVQPGGSLRLSCAASGYTFTSY |
| | | WMNWVRQAPGKGLVWVSRIDPYDSETHYNQKFKDRFTISVDKAKSTAYLQMNSLRAEDTA |
| | | VYYCARGNWDDYWGQGTTVTVSSTTTPAPRPPTPAPTIASQPLSLRPEACRPAAGGAVHT |
| | | RGLDFACDIYIWAPLAGTCGVLLLSLVITLYCKRGRKKLLYIFKQPFMRPVQTTQEEDGC |
| | | SCRFPEEEEGGCELRVKFSRSADAPAYKQGQNQLYNELNLGRREEYDVLDKRRGRDPEMG |
| | | GKPRRKNPQEGLYNELQKDKMAEAYSEIGMKGERRRGKGHDGLYQGLSTATKDTYDALHM |
| | | QALPPR |
| hzCAR12 | 2212 | MALPVTALLLPLALLLHAARPDVQLTQSPSFLSASVGDRVTITCRASKSISKDLAWYQQK |
| 3-29 | | PGKAPKLLIYSGSTLQSGVPSRFSGSGSGTEFTLTISSLQPEDFATYYCQQHNKYPYTFG |
| scFv | | GGTKVEIKGGGGSGGGGSGGGGSGGGGSEVQLVESGGGLVQPGGSLRLSCAASGYTFTSY |
| | | WMNWVRQAPGKGLVWVSRIDPYDSETHYNQKFKDRFTISVDKAKSTAYLQMNSLRAEDTA |
| | | VYYCARGNWDDYWGQGTTVTVSS |
| hzCAR12 | 2271 | EVQLVESGGGLVQPGGSLRLSCAASGYTFTSYWMNWVRQAPGKGLVWVSRIDPYDSETHYN |
| 3-29 VH | | QKFKDRFTISVDKAKSTAYLQMNSLRAEDTAVYYCARGNWDDYWGQGTTVTVSS |
| hzCAR12 | 2330 | DVQLTQSPSFLSASVGDRVTITCRASKSISKDLAWYQQKPGKAPKLLIYSGSTLQSGVPSR |
| 3-29 VL | | FSGSGSGTEFTLTISSLQPEDFATYYCQQHNKYPYTFGGGTKVEIK |
| hzCAR12 | 2095 | ATGGCCCTCCCTGTCACCGCCCTGCTGCTTCCGCTGGCTCTTCTGCTCCACGCCGCTCGGC |
| 3-30 NT | | CCGAAGTGGTGCTGACCCAGTCGCCCGCAACCCTCTCTCTGTCGCCGGGAGAACGCGCCAC |
| | | TCTTTCCTGTCGGGCGTCCAAGAGCATCTCAAAGGACCTCGCCTGGTACCAGCAGAAGCCT |
| | | GGTCAAGCCCCGCGGCTGCTGATCTACTCCGGCTCCACGCTGCAATCAGGAATCCCAGCCA |
| | | GATTTTCCGGTTCGGGGTCGGGGACTGACTTCACCTTGACCATTAGCTCGCTGGAACCTGA |
| | | GGACTTCGCCGTGTATTACTGCCAGCAGCACAACAAGTACCCGTACACCTTCGGAGGCGGT |
| | | ACTAAGGTCGAGATCAAGGGGGGTGGCGGTAGCGGAGGAGGGGGCTCCGGCGGCGGCGGCT |
| | | CAGGGGGCGGAGGAAGCGAAGTGCAGCTCGTCGAGAGCGGAGGGGGACTGGTGCAGCCCGG |
| | | AGGAAGCCTGAGGCTGTCCTGCGCTGCCTCCGGCTACACCTTCACCTCCTACTGGATGAAC |
| | | TGGGTCAGACAGGCACCTGGAAAGGGACTGGTCTGGGTGTCGCGCATTGACCCCTACGACT |
| | | CCGAAACCCATTACAATCAGAAATTCAAGGACCGCTTCACCATCTCCGTGGACAAAGCCAA |
| | | GAGCACCGCGTACCTCCAAATGAACTCCCTGCGCGCTGAGGATACAGCAGTGTACTATTGC |
| | | GCCCGGGGAAACTGGGATGATTACTGGGGCCAGGGAACTACTGTGACTGTGTCATCCACCA |
| | | CTACCCCAGCACCGAGGCCACCCACCCCGGCTCCTACCATCGCCTCCCAGCCTCTGTCCCT |
| | | GCGTCCGGAggcatgtagacccgcagctggtggggccgtgcatacccggggtcttgacttc |
| | | gcctgcgatatctacatttgggcccctctggctggtacttgcggggtcctgctgctttcac |
| | | tcgtgatcactctttactgtaagcgcggtcggaagaagctgctgtacatctttaagcaacc |
| | | cttcatgaggcctgtgcagactactcaagaggaggacggctgttcatgccggttcccagag |
| | | gaggaggaaggcggctgcgaactgcgcgtgaaattcagccgcagcgcagatgctccagcct |
| | | acaagcaggggcagaaccagctctacaacgaactcaatcttggtcggagagaggagtacga |
| | | cgtgctggacaagcggagaggacgggacccagaaatgggcgggaagccgcgcagaaagaat |
| | | ccccaagagggcctgtacaacgagctccaaaaggataagatggcagaagcctatagcgaga |
| | | ttggtatgaaaggggaacgcagaagaggcaaaggccacgacggactgtaccagggactcag |
| | | caccgccaccaaggacacctatgacgctcttcacatgcaggccctgccgcctcgg |
| hzCAR12 | 2154 | MALPVTALLLPLALLLHAARPEVVLTQSPATLSLSPGERATLSCRASKSISKDLAWYQQK |
| 3-30 AA | | PGQAPRLLIYSGSTLQSGIPARFSGSGSGTDFTLTISSLEPEDFAVYYCQQHNKYPYTFG |
| | | GGTKVEIKGGGGSGGGGSGGGGSGGGGSEVQLVESGGGLVQPGGSLRLSCAASGYTFTSY |
| | | WMNWVRQAPGKGLVWVSRIDPYDSETHYNQKFKDRFTISVDKAKSTAYLQMNSLRAEDTA |
| | | VYYCARGNWDDYWGQGTTVTVSSTTTPAPRPPTPAPTIASQPLSLRPEACRPAAGGAVHT |
| | | RGLDFACDIYIWAPLAGTCGVLLLSLVITLYCKRGRKKLLYIFKQPFMRPVQTTQEEDGC |
| | | SCRFPEEEEGGCELRVKFSRSADAPAYKQGQNQLYNELNLGRREEYDVLDKRRGRDPEMG |
| | | GKPRRKNPQEGLYNELQKDKMAEAYSEIGMKGERRRGKGHDGLYQGLSTATKDTYDALHM |
| | | QALPPR |
| hzCAR12 | 2213 | MALPVTALLLPLALLLHAARPEVVLTQSPATLSLSPGERATLSCRASKSISKDLAWYQQK |
| 3-30 | | PGQAPRLLIYSGSTLQSGIPARFSGSGSGTDFTLTISSLEPEDFAVYYCQQHNKYPYTFG |
| scFv | | GGTKVEIKGGGGSGGGGSGGGGSGGGGSEVQLVESGGGLVQPGGSLRLSCAASGYTFTSY |
| | | WMNWVRQAPGKGLVWVSRIDPYDSETHYNQKFKDRFTISVDKAKSTAYLQMNSLRAEDTA |
| | | VYYCARGNWDDYWGQGTTVTVSS |
| hzCAR12 | 2272 | EVQLVESGGGLVQPGGSLRLSCAASGYTFTSYWMNWVRQAPGKGLVWVSRIDPYDSETHYN |
| 3-30 VH | | QKFKDRFTISVDKAKSTAYLQMNSLRAEDTAVYYCARGNWDDYWGQGTTVTVSS |
| hzCAR12 | 2331 | EVVLTQSPATLSLSPGERATLSCRASKSISKDLAWYQQKPGQAPRLLIYSGSTLQSGIPAR |
| 3-30 VL | | FSGSGSGTDFTLTISSLEPEDFAVYYCQQHNKYPYTFGGGTKVEIK |
| hzCAR12 | 2096 | ATGGCCCTCCCTGTCACCGCCCTGCTGCTTCCGCTGGCTCTTCTGCTCCACGCCGCTCGGC |
| 3-31 NT | | CCGACGTCGTGATGACCCAGTCACCGGCATTCCTGTCCGTGACTCCCGGAGAAAAGGTCAC |
| | | GATTACTTGCCGGGCGTCCAAGAGCATCTCCAAGGACCTCGCCTGGTACCAACAGAAGCCG |
| | | GACCAGGCCCCTAAGCTGTTGATCTACTCGGGGTCCACCCTTCAATCGGGAGTGCCATCGC |
| | | GGTTTAGCGGTTCGGGTTCTGGGACCGACTTCACTTTCACCATCTCCTCACTGGAAGCCGA |
| | | GGATGCCGCCACTTACTACTGTCAGCAGCACAACAAGTATCCGTACACCTTCGGAGGCGGT |
| | | ACCAAAGTGGAGATCAAGGGGGGTGGCGGTAGCGGAGGAGGGGGCTCCGGCGGCGGCGGCT |
| | | CAGGGGGCGGAGGAAGCGAAGTGCAGCTCGTCGAGAGCGGAGGGGGACTGGTGCAGCCCGG |
| | | AGGAAGCCTGAGGCTGTCCTGCGCTGCCTCCGGCTACACCTTCACCTCCTACTGGATGAAC |
| | | TGGGTCAGACAGGCACCTGGAAAGGGACTGGTCTGGGTGTCGCGCATTGACCCCTACGACT |
| | | CCGAAACCCATTACAATCAGAAATTCAAGGACCGCTTCACCATCTCCGTGGACAAAGCCAA |
| | | GAGCACCGCGTACCTCCAAATGAACTCCCTGCGCGCTGAGGATACAGCAGTGTACTATTGC |
| | | GCCCGGGGAAACTGGGATGATTACTGGGGCCAGGGAACTACTGTGACTGTGTCATCCACCA |
| | | CTACCCCAGCACCGAGGCCACCCACCCCGGCTCCTACCATCGCCTCCCAGCCTCTGTCCCT |
| | | GCGTCCGGAggcatgtagacccgcagctggtggggccgtgcatacccggggtcttgacttc |
| | | gcctgcgatatctacatttgggcccctctggctggtacttgcggggtcctgctgctttcac |
| | | tcgtgatcactctttactgtaagcgcggtcggaagaagctgctgtacatctttaagcaacc |
| | | cttcatgaggcctgtgcagactactcaagaggaggacggctgttcatgccggttcccagag |
| | | gaggaggaaggcggctgcgaactgcgcgtgaaattcagccgcagcgcagatgctccagcct |
| | | acaagcaggggcagaaccagctctacaacgaactcaatcttggtcggagagaggagtacga |
| | | cgtgctggacaagcggagaggacgggacccagaaatgggcgggaagccgcgcagaaagaat |
| | | ccccaagagggcctgtacaacgagctccaaaaggataagatggcagaagcctatagcgaga |
| | | ttggtatgaaaggggaacgcagaagaggcaaaggccacgacggactgtaccagggactcag |
| | | caccgccaccaaggacacctatgacgctcttcacatgcaggccctgccgcctcgg |
| hzCAR12 | 2155 | MALPVTALLLPLALLLHAARPDVVMTQSPAFLSVTPGEKVTITCRASKSISKDLAWYQQK |
| 3-31 AA | | PDQAPKLLIYSGSTLQSGVPSRFSGSGSGTDFTFTISSLEAEDAATYYCQQHNKYPYTFG |
| | | GGTKVEIKGGGGSGGGGSGGGGSGGGGSEVQLVESGGGLVQPGGSLRLSCAASGYTFTSY |
| | | WMNWVRQAPGKGLVWVSRIDPYDSETHYNQKFKDRFTISVDKAKSTAYLQMNSLRAEDTA |
| | | VYYCARGNWDDYWGQGTTVTVSSTTTPAPRPPTPAPTIASQPLSLRPEACRPAAGGAVHT |
| | | RGLDFACDIYIWAPLAGTCGVLLLSLVITLYCKRGRKKLLYIFKQPFMRPVQTTQEEDGC |
| | | SCRFPEEEEGGCELRVKFSRSADAPAYKQGQNQLYNELNLGRREEYDVLDKRRGRDPEMG |
| | | GKPRRKNPQEGLYNELQKDKMAEAYSEIGMKGERRRGKGHDGLYQGLSTATKDTYDALHM |
| | | QALPPR |
| hzCAR12 | 2214 | MALPVTALLLPLALLLHAARPDVVMTQSPAFLSVTPGEKVTITCRASKSISKDLAWYQQK |
| 3-31 | | PDQAPKLLIYSGSTLQSGVPSRFSGSGSGTDFTFTISSLEAEDAATYYCQQHNKYPYTFG |
| scFv | | GGTKVEIKGGGGSGGGGSGGGGSGGGGSEVQLVESGGGLVQPGGSLRLSCAASGYTFTSY |
| | | WMNWVRQAPGKGLVWVSRIDPYDSETHYNQKFKDRFTISVDKAKSTAYLQMNSLRAEDTA |
| | | VYYCARGNWDDYWGQGTTVTVSS |
| hzCAR12 | 2273 | EVQLVESGGGLVQPGGSLRLSCAASGYTFTSYWMNWVRQAPGKGLVWVSRIDPYDSETHYN |
| 3-31 VH | | QKFKDRFTISVDKAKSTAYLQMNSLRAEDTAVYYCARGNWDDYWGQGTTVTVSS |
| hzCAR12 | 2332 | DVVMTQSPAFLSVTPGEKVTITCRASKSISKDLAWYQQKPDQAPKLLIYSGSTLQSGVPSR |
| 3-31 VL | | FSGSGSGTDFTFTISSLEAEDAATYYCQQHNKYPYTFGGGTKVEIK |
| hzCAR12 | 2097 | ATGGCCCTCCCTGTCACCGCCCTGCTGCTTCCGCTGGCTCTTCTGCTCCACGCCGCTCGGC |
| 3-32 NT | | CCGACGTGGTCATGACTCAGTCCCCGGACTCACTCGCGGTGTCGCTTGGAGAGAGAGCGAC |
| | | CATCAACTGTCGGGCCTCAAAGAGCATCAGCAAGGACCTGGCCTGGTACCAGCAGAAGCCG |
| | | GGACAGCCGCCAAAGCTGCTGATCTACTCCGGGTCCACCTTGCAATCTGGTGTCCCTGACC |
| | | GGTTCTCCGGTTCCGGGTCGGGTACCGACTTCACGCTCACTATTTCGTCGCTGCAAGCCGA |
| | | AGATGTGGCCGTGTACTATTGCCAACAGCACAACAAGTACCCCTACACTTTTGGCGGAGGC |
| | | ACCAAGGTGGAAATCAAGGGGGGTGGCGGTAGCGGAGGAGGGGGCTCCGGCGGCGGCGGCT |
| | | CAGGGGGCGGAGGAAGCGAAGTGCAGCTCGTCGAGAGCGGAGGGGGACTGGTGCAGCCCGG |
| | | AGGAAGCCTGAGGCTGTCCTGCGCTGCCTCCGGCTACACCTTCACCTCCTACTGGATGAAC |
| | | TGGGTCAGACAGGCACCTGGAAAGGGACTGGTCTGGGTGTCGCGCATTGACCCCTACGACT |
| | | CCGAAACCCATTACAATCAGAAATTCAAGGACCGCTTCACCATCTCCGTGGACAAAGCCAA |
| | | GAGCACCGCGTACCTCCAAATGAACTCCCTGCGCGCTGAGGATACAGCAGTGTACTATTGC |
| | | GCCCGGGGAAACTGGGATGATTACTGGGGCCAGGGAACTACTGTGACTGTGTCATCCACCA |
| | | CTACCCCAGCACCGAGGCCACCCACCCCGGCTCCTACCATCGCCTCCCAGCCTCTGTCCCT |
| | | GCGTCCGGAggcatgtagacccgcagctggtggggccgtgcatacccggggtcttgacttc |
| | | gcctgcgatatctacatttgggcccctctggctggtacttgcggggtcctgctgctttcac |
| | | tcgtgatcactctttactgtaagcgcggtcggaagaagctgctgtacatctttaagcaacc |
| | | cttcatgaggcctgtgcagactactcaagaggaggacggctgttcatgccggttcccagag |
| | | gaggaggaaggcggctgcgaactgcgcgtgaaattcagccgcagcgcagatgctccagcct |
| | | acaagcaggggcagaaccagctctacaacgaactcaatcttggtcggagagaggagtacga |
| | | cgtgctggacaagcggagaggacgggacccagaaatgggcgggaagccgcgcagaaagaat |
| | | ccccaagagggcctgtacaacgagctccaaaaggataagatggcagaagcctatagcgaga |
| | | ttggtatgaaaggggaacgcagaagaggcaaaggccacgacggactgtaccagggactcag |
| | | caccgccaccaaggacacctatgacgctcttcacatgcaggccctgccgcctcgg |
| hzCAR12 | 2156 | MALPVTALLLPLALLLHAARPDVVMTQSPDSLAVSLGERATINCRASKSISKDLAWYQQK |
| 3-32 AA | | PGQPPKLLIYSGSTLQSGVPDRFSGSGSGTDFTLTISSLQAEDVAVYYCQQHNKYPYTFG |
| | | GGTKVEIKGGGGSGGGGSGGGGSGGGGSEVQLVESGGGLVQPGGSLRLSCAASGYTFTSY |
| | | WMNWVRQAPGKGLVWVSRIDPYDSETHYNQKFKDRFTISVDKAKSTAYLQMNSLRAEDTA |
| | | VYYCARGNWDDYWGQGTTVTVSSTTTPAPRPPTPAPTIASQPLSLRPEACRPAAGGAVHT |
| | | RGLDFACDIYIWAPLAGTCGVLLLSLVITLYCKRGRKKLLYIFKQPFMRPVQTTQEEDGC |
| | | SCRFPEEEEGGCELRVKFSRSADAPAYKQGQNQLYNELNLGRREEYDVLDKRRGRDPEMG |
| | | GKPRRKNPQEGLYNELQKDKMAEAYSEIGMKGERRRGKGHDGLYQGLSTATKDTYDALHM |
| | | QALPPR |
| hzCAR12 | 2215 | MALPVTALLLPLALLLHAARPDVVMTQSPDSLAVSLGERATINCRASKSISKDLAWYQQK |
| 3-32 | | PGQPPKLLIYSGSTLQSGVPDRFSGSGSGTDFTLTISSLQAEDVAVYYCQQHNKYPYTFG |
| scFv | | GGTKVEIKGGGGSGGGGSGGGGSGGGGSEVQLVESGGGLVQPGGSLRLSCAASGYTFTSY |
| | | WMNWVRQAPGKGLVWVSRIDPYDSETHYNQKFKDRFTISVDKAKSTAYLQMNSLRAEDTA |
| | | VYYCARGNWDDYWGQGTTVTVSS |
| hzCAR12 | 2274 | EVQLVESGGGLVQPGGSLRLSCAASGYTFTSYWMNWVRQAPGKGLVWVSRIDPYDSETHYN |
| 3-32 VH | | QKFKDRFTISVDKAKSTAYLQMNSLRAEDTAVYYCARGNWDDYWGQGTTVTVSS |
| hzCAR12 | 2333 | DVVMTQSPDSLAVSLGERATINCRASKSISKDLAWYQQKPGQPPKLLIYSGSTLQSGVPDR |
| 3-32 VL | | FSGSGSGTDFTLTISSLQAEDVAVYYCQQHNKYPYTFGGGTKVEIK |

[0332] In embodiments, a CAR molecule described herein comprises a scFv that specifically binds to CD123, and does not contain a leader sequence, e.g., the amino acid sequence SEQ ID NO: 2. Table 28 below provides amino acid and nucleotide sequences for CD123 scFv sequences that do not contain a leader sequence SEQ ID NO: 2.

TABLE 28
CD123 CAR scFv sequences

| | SEQ | |
|---|---|---|
| | ID | |
| Name | NO: | Sequence |
| CAR123-2 | 2479 | CAAGTGCAACTCGTCCAAAGCGGAGCGGAAGTCAAGAAACCCGGAGCGAGCGTGAAAGTG |
| scFv-NT | | TCCTGCAAAGCCTCCGGCTACACCTTTACGGGCTACTACATGCACTGGGTGCGCCAGGCA |
| | | CCAGGACAGGGTCTTGAATGGATGGGATGGATCAACCCTAATTCGGGCGGAACTAACTAC |
| | | GCACAGAAGTTCCAGGGGAGAGTGACTCTGACTCGGGATACCTCCATCTCAACTGTCTAC |
| | | ATGGAACTCTCCCGCTTGCGGTCAGATGATACGGCAGTGTACTACTGCGCCCGCGACATG |
| | | AATATCCTGGCTACCGTGCCGTTCGACATCTGGGGACAGGGGACTATGGTTACTGTCTCA |
| | | TCGGGCGGTGGAGGTTCAGGAGGAGGCGGCTCGGGAGGCGGAGGTTCGGACATTCAGATG |
| | | ACCCAGTCCCCATCCTCTCTGTCGGCCAGCGTCGGAGATAGGGTGACCATTACCTGTCGG |
| | | GCCTCGCAAAGCATCTCCTCGTACCTCAACTGGTATCAGCAAAAGCCGGGAAAGGCGCCT |
| | | AAGCTGCTGATCTACGCCGCTTCGAGCTTGCAAAGCGGGGTGCCATCCAGATTCTCGGGA |
| | | TCAGGCTCAGGAACCGACTTCACCCTGACCGTGAACAGCCTCCAGCCGGAGGACTTTGCC |
| | | ACTTACTACTGCCAGCAGGGAGACTCCGTGCCGCTTACTTTCGGGGGGGGTACCCGCCTG |
| | | GAGATCAAG |
| CAR123-2 | 2480 | QVQLVQSGAEVKKPGASVKVSCKASGYTFTGYYMHWVRQAPGQGLEWMGWINPNSGGTNY |
| scFv-AA | | AQKFQGRVTLTRDTSISTVYMELSRLREDDTAVYYCARDMNILATVPFDIWGQGTMVTVS |
| | | SGGGGSGGGGSGGGGSDIQMTQSPSSLSASVGDRVTITCRASQSISSYLNWYQQKPGKAP |
| | | KLLIYAASSLQSGVPSRFSGSGSGTDFTLTVNSLQPEDFATYYCQQGDSVPLTEGGGTRL |
| | | EIK |
| CAR123-2 | 2481 | atggccctccctgtcaccgccctgctgcttccgctggctcttctgctccacgccgctcgg |
| ORF-free | | ccccaagtgcaactcgtccaaagcggagcggaagtcaagaaacccggagcgagcgtgaaa |
| NT | | gtgtcctgcaaagcctccggctacacctttacgggctactacatgcactgggtgcgccag |
| | | gcaccaggacagggtcttgaatggatgggatggatcaaccctaattcgggcggaactaac |
| | | tacgcacagaagttccaggggagagtgactctgactcgggatacctccatctcaactgtc |
| | | tacatggaactctcccgcttgcggtcagatgatacggcagtgtactactgcgcccgcgac |
| | | atgaatatcctggctaccgtgccgttcgacatctggggacaggggactatggttactgtc |
| | | tcatcgggcggtggaggttcaggaggaggcggctcgggaggcggaggttcggacattcag |
| | | atgacccagtccccatcctctctgtcggccagcgtcggagatagggtgaccattacctgt |
| | | cgggcctcgcaaagcatctcctcgtacctcaactggtatcagcaaaagccgggaaaggcg |
| | | cctaagctgctgatctacgccgcttcgagcttgcaaagcggggtgccatccagattctcg |
| | | ggatcaggctcaggaaccgacttcaccctgaccgtgaacagcctccagccggaggacttt |
| | | gccacttactactgccagcagggagactccgtgccgcttactttcggggggggtacccgc |
| | | ctggagatcaagaccactaccccagcaccgaggccacccaccccggctcctaccatcgcc |
| | | tcccagcctctgtccctgcgtccggaggcatgtagacccgcagctggtggggccgtgcat |
| | | acccggggtcttgacttcgcctgcgatatctacatttgggcccctctggctggtacttgc |
| | | ggggtcctgctgctttcactcgtgatcactctttactgtaagcgcggtcggaagaagctg |
| | | ctgtacatctttaagcaacccttcatgaggcctgtgcagactactcaagaggaggacggc |
| | | tgttcttgccggttcccagaggaggaggaaggcggctgcgaactgcgcgtgaaattcagc |
| | | cgcagcgcagacgctccagcctacaagcaggggcagaaccagctctacaacgaactcaat |
| | | cttggtcggagagaggagtacgacgtgctggacaagcggagaggacgggacccagaaatg |
| | | ggcgggaagccgcgcagaaagaatccccaagagggcctgtacaacgagctccaaaaggat |
| | | aagatggcagaagcctatagcgagattggtatgaaaggggaacgcagaagaggcaaaggc |
| | | cacgacggactgtaccagggactcagcaccgccaccaaggacacctatgacgctcttcac |
| | | atgcaggccctgccgcctcggtaagtcgacagctcgctttcttgctgtccaatttctatt |
| | | aaaggttcctttgttccctaagtccaactactaaactgggggatattatgaagggccttg |
| | | agcatctggattctgcctaataaaaaacatttattttcattgctgcgtcgagagctcgct |
| | | ttcttgctgtccaatttctattaaaggttcctttgttccctaagtccaactactaaactg |
| | | ggggatattatgaagggccttgagcatctggattctgcctaataaaaaacatttattttc |
| | | attgctgcctcgacgaattc |
| CAR123-3 | 2482 | CAAGTCCAACTCGTTCAATCCGGCGCAGAAGTCAAGAAGCCAGGAGCATCAGTGAAAGTG |
| scFv-NT | | TCCTGCAAAGCCTCAGGCTACATCTTCACGGGATACTACATCCACTGGGTGCGCCAGGCT |
| | | CCGGGCCAGGGCCTTGAGTGGATGGGCTGGATCAACCCTAACTCTGGGGGAACCAACTAC |
| | | GCTCAGAAGTTCCAGGGGAGGGTCACTATGACTCGCGATACCTCCATCTCCACTGCGTAC |
| | | ATGGAACTCTCGGGACTGAGATCCGACGATCCTGCCGTGTACTACTGCGCCCGGGACATG |
| | | AACATCTTGGCGACCGTGCCGTTTGACATTTGGGGACAGGGCACCCTCGTCACTGTGTCG |
| | | AGCGGTGGAGGAGGCTCGGGGGGTGGCGGATCAGGAGGGGGAGGAAGCGACATCCAGCTG |
| | | ACTCAGAGCCCATCGTCGTTGTCCGCGTCGGTGGGGGATAGAGTGACCATTACTTGCCGC |
| | | GCCAGCCAGAGCATCTCATCATATCTGAATTGGTACCAGCAGAAGCCCGGAAAGGCCCCA |
| | | AAACTGCTGATCTACGCTGCAAGCAGCCTCCAATCGGGAGTGCCGTCACGGTTCTCCGGG |
| | | TCCGGTTCGGGAACTGACTTTACCCTGACCGTGAATTCGCTGCAACCGGAGGATTTCGCC |
| | | ACGTACTACTGTCAGCAAGGAGACTCCGTGCCGCTGACCTTCGGTGGAGGCACCAAGGTC |
| | | GAAATCAAG |
| CAR123-3 | 2483 | QVQLVQSGAEVKKPGASVKVSCKASGYIFTGYYIHWVRQAPGQGLEWMGWINPNSGGTNY |
| scFv-AA | | AQKFQGRVTMTRDTSISTAYMELSGLREDDPAVYYCARDMNILATVPFDIWGQGTLVTVS |
| | | SGGGGSGGGGSGGGGSDIQLTQSPSSLSASVGDRVTITCRASQSISSYLNWYQQKPGKAP |
| | | KLLIYAASSLQSGVPSRFSGSGSGTDFTLTVNSLQPEDFATYYCQQGDSVPLTEGGGTKV |
| | | EIK |
| CAR123-4 | 2484 | CAAGTCCAACTCCAACAGTCAGGCGCAGAAGTGAAAAAGAGCGGTGCATCGGTGAAAGTG |
| scFv-NT | | TCATGCAAAGCCTCGGGCTACACCTTCACTGACTACTATATGCACTGGCTGCGGCAGGCA |
| | | CCGGGACAGGGACTTGAGTGGATGGGATGGATCAACCCGAATTCAGGGGACACTAACTAC |
| | | GCGCAGAAGTTCCAGGGGAGAGTGACCCTGACGAGGGACACCTCAATTTCGACCGTCTAC |
| | | ATGGAATTGTCGCGCCTGAGATCGGACGATACTGCTGTGTACTACTGTGCCCGCGACATG |
| | | AACATCCTCGCGACTGTGCCTTTTGATATCTGGGGACAGGGGACTATGGTCACCGTTTCC |
| | | TCCGCTTCCGGTGGCGGAGGCTCGGGAGGCCGGGCCTCCGGTGGAGGAGGCAGCGACATC |
| | | CAGATGACTCAGAGCCCTTCCTCGCTGAGCGCCTCAGTGGGAGATCGCGTGACCATCACT |
| | | TGCCGGGCCAGCCAGTCCATTTCGTCCTACCTCAATTGGTACCAGCAGAAGCCGGGAAAG |
| | | GCGCCCAAGCTCTTGATCTACGCTGCGAGCTCCCTGCAAAGCGGGGTGCCGAGCCGATTC |
| | | TCGGGTTCCGGCTCGGGAACCGACTTCACTCTGACCATCTCATCCCTGCAACCAGAGGAC |
| | | TTTGCCACCTACTACTGCCAACAAGGAGATTCTGTCCCACTGACGTTCGGCGGAGGAACC |
| | | AAGGTCGAAATCAAG |
| CAR123-4 | 2485 | QVQLQQSGAEVKKSGASVKVSCKASGYTFTDYYMHWLRQAPGQGLEWMGWINPNSGDTNY |
| scFv-AA | | AQKFQGRVTLTRDTSISTVYMELSRLRSDDTAVYYCARDMNILATVPFDIWGQGTMVTVS |
| | | SASGGGGSGGRASGGGGSDIQMTQSPSSLSASVGDRVTITCRASQSISSYLNWYQQKPGK |
| | | APKLLIYAASSLQSGVPSRFSGSGSGTDFTLTISSLQPEDFATYYCQQGDSVPLTFGGGT |
| | | KVEIK |
| CAR123-1 | 2478 | QVQLVQSGAEVKKPGASVKVSCKASGYTFTGYYMHWVRQAPGQGLEWMGWINPNSGGTNY |
| scFv-AA | | AQKFQGRVTMTRDTSISTAYMELSRLRSDDTAVYYCARDMNILATVPFDIWGQGTMVTVS |
| | | SGGGGSGGGGSGGGGSDIQMTQSPSSLSASVGDRVTITCRASQSISTYLNWYQQKPGKAP |
| | | NLLIYAAFSLQSGVPSRFSGSGSGTDFTLTINSLQPEDFATYYCQQGDSVPLTFGGGTKL |
| | | EIK |
| hzCAR123- | 2556 | QVQLVQSGAEVKKPGASVKVSCKASGYTFTSYWMNWVRQAPGQGLEWMGRIDPYDSETHY |
| 1 scFv | | NQKFKDRVTMTVDKSTSTAYMELSSLRSEDTAVYYCARGNWDDYWGQGTTVTVSSGGGGS |
| | | GGGGSGGGGSGGGGSDVQLTQSPSFLSASVGDRVTITCRASKSISKDLAWYQQKPGKAPK |
| | | LLIYSGSTLQSGVPSRFSGSGSGTEFTLTISSLQPEDFATYYCQQHNKYPYTFGGGTKVE |
| | | IK |
| hzCAR123- | 2557 | QVQLVQSGAEVKKPGASVKVSCKASGYTFTSYWMNWVRQ |
| 2 scFv | | APGQGLEWMGRIDPYDSETHYNQKFKDRVTMTVDKSTSTAYMELSSLRSEDTAVYYCARG |
| | | NWDDYWGQGTTVTVSSGGGGSGGGGSGGGGSGGGGSEVVLTQSPATLSLSPGERATLSCR |
| | | ASKSISKDLAWYQQKPGQAPRLLIYSGSTLQSGIPARFSGSGSGTDFTLTISSLEPEDFA |
| | | VYYCQQHNKYPYTFGGGTKVEIK |
| hzCAR123- | 2558 | QVQLVQSGAEVKKPGASVKVSCKASGYTFTSYWMNWVRQ |
| 3 scFv | | APGQGLEWMGRIDPYDSETHYNQKFKDRVTMTVDKSTSTAYMELSSLRSEDTAVYYCARG |
| | | NWDDYWGQGTTVTVSSGGGGSGGGGSGGGGSGGGGSDVVMTQSPAFLSVTPGEKVTITCR |
| | | ASKSISKDLAWYQQKPDQAPKLLIYSGSTLQSGVPSRFSGSGSGTDFTFTISSLEAEDAA |
| | | TYYCQQHNKYPYTFGGGTKVEIK |
| hzCAR123- | 2559 | QVQLVQSGAEVKKPGASVKVSCKASGYTFTSYWMNWVRQ |
| 4 scFv | | APGQGLEWMGRIDPYDSETHYNQKFKDRVTMTVDKSTSTAYMELSSLRSEDTAVYYCARG |
| | | NWDDYWGQGTTVTVSSGGGGSGGGGSGGGGSGGGGSDVVMTQSPDSLAVSLGERATINCR |
| | | ASKSISKDLAWYQQKPGQPPKLLIYSGSTLQSGVPDRFSGSGSGTDFTLTISSLQAEDVA |
| | | VYYCQQHNKYPYTFGGGTKVEIK |
| hzCAR123- | 2560 | DVQLTQSPSFLSASVGDRVTITCRASKSISKDLAWYQQK |
| 5 scFv | | PGKAPKLLIYSGSTLQSGVPSRFSGSGSGTEFTLTISSLQPEDFATYYCQQHNKYPYTFG |
| | | GGTKVEIKGGGGSGGGGSGGGGSGGGGSQVQLVQSGAEVKKPGASVKVSCKASGYTFTSY |
| | | WMNWVRQAPGQGLEWMGRIDPYDSETHYNQKFKDRVTMTVDKSTSTAYMELSSLRSEDTA |
| | | VYYCARGNWDDYWGQGTTVTVSS |
| hzCAR123- | 2561 | EVVLTQSPATLSLSPGERATLSCRASKSISKDLAWYQQK |
| 6 scFv | | PGQAPRLLIYSGSTLQSGIPARFSGSGSGTDFTLTISSLEPEDFAVYYCQQHNKYPYTFG |
| | | GGTKVEIKGGGGSGGGGSGGGGSGGGGSQVQLVQSGAEVKKPGASVKVSCKASGYTFTSY |
| | | WMNWVRQAPGQGLEWMGRIDPYDSETHYNQKFKDRVTMTVDKSTSTAYMELSSLRSEDTA |
| | | VYYCARGNWDDYWGQGTTVTVSS |
| hzCAR123- | 2562 | DVVMTQSPAFLSVTPGEKVTITCRASKSISKDLAWYQQK |
| 7 scFv | | PDQAPKLLIYSGSTLQSGVPSRFSGSGSGTDFTFTISSLEAEDAATYYCQQHNKYPYTFG |
| | | GGTKVEIKGGGGSGGGGSGGGGSGGGGSQVQLVQSGAEVKKPGASVKVSCKASGYTFTSY |
| | | WMNWVRQAPGQGLEWMGRIDPYDSETHYNQKFKDRVTMTVDKSTSTAYMELSSLRSEDTA |
| | | VYYCARGNWDDYWGQGTTVTVSS |
| hzCAR123- | 2563 | DVVMTQSPDSLAVSLGERATINCRASKSISKDLAWYQQK |
| 8 scFv | | PGQPPKLLIYSGSTLQSGVPDRFSGSGSGTDFTLTISSLQAEDVAVYYCQQHNKYPYTFG |
| | | GGTKVEIKGGGGSGGGGSGGGGSGGGGSQVQLVQSGAEVKKPGASVKVSCKASGYTFTSY |
| | | WMNWVRQAPGQGLEWMGRIDPYDSETHYNQKFKDRVTMTVDKSTSTAYMELSSLRSEDTA |
| | | VYYCARGNWDDYWGQGTTVTVSS |
| hzCAR123- | 2564 | QVQLVQSGSELKKPGASVKVSCKASGYTFTSYWMNWVRQ |
| 9 scFv | | APGQGLEWMGRIDPYDSETHYNQKFKDRFVFSVDKSVSTAYLQISSLKAEDTAVYYCARG |
| | | NWDDYWGQGTTVTVSSGGGGSGGGGSGGGGSGGGGSDVQLTQSPSFLSASVGDRVTITCR |
| | | ASKSISKDLAWYQQKPGKAPKLLIYSGSTLQSGVPSRFSGSGSGTEFTLTISSLQPEDFA |
| | | TYYCQQHNKYPYTFGGGTKVEIK |
| hzCAR123- | 2565 | QVQLVQSGSELKKPGASVKVSCKASGYTFTSYWMNWVRQ |
| 10 scFv | | APGQGLEWMGRIDPYDSETHYNQKFKDRFVFSVDKSVSTAYLQISSLKAEDTAVYYCARG |
| | | NWDDYWGQGTTVTVSSGGGGSGGGGSGGGGSGGGGSEVVLTQSPATLSLSPGERATLSCR |
| | | ASKSISKDLAWYQQKPGQAPRLLIYSGSTLQSGIPARFSGSGSGTDFTLTISSLEPEDFA |
| | | VYYCQQHNKYPYTFGGGTKVEIK |
| hzCAR123- | 2566 | QVQLVQSGSELKKPGASVKVSCKASGYTFTSYWMNWVRQ |
| 11 scFv | | APGQGLEWMGRIDPYDSETHYNQKFKDRFVFSVDKSVSTAYLQISSLKAEDTAVYYCARG |
| | | NWDDYWGQGTTVTVSSGGGGSGGGGSGGGGSGGGGSDVVMTQSPAFLSVTPGEKVTITCR |
| | | ASKSISKDLAWYQQKPDQAPKLLIYSGSTLQSGVPSRFSGSGSGTDFTFTISSLEAEDAA |
| | | TYYCQQHNKYPYTFGGGTKVEIK |
| hzCAR123- | 2567 | QVQLVQSGSELKKPGASVKVSCKASGYTFTSYWMNWVRQ |
| 12 scFv | | APGQGLEWMGRIDPYDSETHYNQKFKDRFVFSVDKSVSTAYLQISSLKAEDTAVYYCARG |
| | | NWDDYWGQGTTVTVSSGGGGSGGGGSGGGGSGGGGSDVVMTQSPDSLAVSLGERATINCR |
| | | ASKSISKDLAWYQQKPGQPPKLLIYSGSTLQSGVPDRFSGSGSGTDFTLTISSLQAEDVA |
| | | VYYCQQHNKYPYTFGGGTKVEIK |
| hzCAR123- | 2568 | DVQLTQSPSFLSASVGDRVTITCRASKSISKDLAWYQQK |
| 13 scFv | | PGKAPKLLIYSGSTLQSGVPSRFSGSGSGTEFTLTISSLQPEDFATYYCQQHNKYPYTFG |
| | | GGTKVEIKGGGGSGGGGSGGGGSGGGGSQVQLVQSGSELKKPGASVKVSCKASGYTFTSY |
| | | WMNWVRQAPGQGLEWMGRIDPYDSETHYNQKFKDRFVFSVDKSVSTAYLQISSLKAEDTA |
| | | VYYCARGNWDDYWGQGTTVTVSS |
| hzCAR123- | 2569 | EVVLTQSPATLSLSPGERATLSCRASKSISKDLAWYQQK |
| 14 scFv | | PGQAPRLLIYSGSTLQSGIPARFSGSGSGTDFTLTISSLEPEDFAVYYCQQHNKYPYTFG |
| | | GGTKVEIKGGGGSGGGGSGGGGSGGGGSQVQLVQSGSELKKPGASVKVSCKASGYTFTSY |
| | | WMNWVRQAPGQGLEWMGRIDPYDSETHYNQKFKDRFVFSVDKSVSTAYLQISSLKAEDTA |
| | | VYYCARGNWDDYWGQGTTVTVSS |
| hzCAR123- | 2570 | DVVMTQSPAFLSVTPGEKVTITCRASKSISKDLAWYQQK |
| 15 scFv | | PDQAPKLLIYSGSTLQSGVPSRFSGSGSGTDFTFTISSLEAEDAATYYCQQHNKYPYTFG |
| | | GGTKVEIKGGGGSGGGGSGGGGSGGGGSQVQLVQSGSELKKPGASVKVSCKASGYTFTSY |
| | | WMNWVRQAPGQGLEWMGRIDPYDSETHYNQKFKDRFVFSVDKSVSTAYLQISSLKAEDTA |
| | | VYYCARGNWDDYWGQGTTVTVSS |
| hzCAR123- | 2571 | DVVMTQSPDSLAVSLGERATINCRASKSISKDLAWYQQK |
| 16 scFv | | PGQPPKLLIYSGSTLQSGVPDRFSGSGSGTDFTLTISSLQAEDVAVYYCQQHNKYPYTFG |
| | | GGTKVEIKGGGGSGGGGSGGGGSGGGGSQVQLVQSGSELKKPGASVKVSCKASGYTFTSY |
| | | WMNWVRQAPGQGLEWMGRIDPYDSETHYNQKFKDRFVFSVDKSVSTAYLQISSLKAEDTA |
| | | VYYCARGNWDDYWGQGTTVTVSS |
| hzCAR123- | 2572 | EVQLVQSGAEVKKPGESLRISCKGSGYTFTSYWMNWVRQ |
| 17 scFv | | MPGKGLEWMGRIDPYDSETHYNQKFKDHVTISVDKSISTAYLQWSSLKASDTAMYYCARG |
| | | NWDDYWGQGTTVTVSSGGGGSGGGGSGGGGSGGGGSDVQLTQSPSFLSASVGDRVTITCR |
| | | ASKSISKDLAWYQQKPGKAPKLLIYSGSTLQSGVPSRFSGSGSGTEFTLTISSLQPEDFA |
| | | TYYCQQHNKYPYTEGGGTKVEIK |
| hzCAR123- | 2573 | EVQLVQSGAEVKKPGESLRISCKGSGYTFTSYWMNWVRQ |
| 18 scFv | | MPGKGLEWMGRIDPYDSETHYNQKFKDHVTISVDKSISTAYLQWSSLKASDTAMYYCARG |
| | | NWDDYWGQGTTVTVSSGGGGSGGGGSGGGGSGGGGSEVVLTQSPATLSLSPGERATLSCR |
| | | ASKSISKDLAWYQQKPGQAPRLLIYSGSTLQSGIPARFSGSGSGTDFTLTISSLEPEDFA |
| | | VYYCQQHNKYPYTEGGGTKVEIK |
| hzCAR123- | 2574 | EVQLVQSGAEVKKPGESLRISCKGSGYTFTSYWMNWVRQ |
| 19 scFv | | MPGKGLEWMGRIDPYDSETHYNQKFKDHVTISVDKSISTAYLQWSSLKASDTAMYYCARG |
| | | NWDDYWGQGTTVTVSSGGGGSGGGGSGGGGSGGGGSDVVMTQSPAFLSVTPGEKVTITCR |
| | | ASKSISKDLAWYQQKPDQAPKLLIYSGSTLQSGVPSRFSGSGSGTDFTFTISSLEAEDAA |
| | | TYYCQQHNKYPYTEGGGTKVEIK |
| hzCAR123- | 2575 | EVQLVQSGAEVKKPGESLRISCKGSGYTFTSYWMNWVRQ |
| 20 scFv | | MPGKGLEWMGRIDPYDSETHYNQKFKDHVTISVDKSISTAYLQWSSLKASDTAMYYCARG |
| | | NWDDYWGQGTTVTVSSGGGGSGGGGSGGGGSGGGGSDVVMTQSPDSLAVSLGERATINCR |
| | | ASKSISKDLAWYQQKPGQPPKLLIYSGSTLQSGVPDRFSGSGSGTDFTLTISSLQAEDVA |
| | | VYYCQQHNKYPYTEGGGTKVEIK |
| hzCAR123- | 2576 | DVQLTQSPSFLSASVGDRVTITCRASKSISKDLAWYQQK |
| 21 scFv | | PGKAPKLLIYSGSTLQSGVPSRFSGSGSGTEFTLTISSLQPEDFATYYCQQHNKYPYTFG |
| | | GGTKVEIKGGGGSGGGGSGGGGSGGGGSEVQLVQSGAEVKKPGESLRISCKGSGYTFTSY |
| | | WMNWVRQMPGKGLEWMGRIDPYDSETHYNQKFKDHVTISVDKSISTAYLQWSSLKASDTA |
| | | MYYCARGNWDDYWGQGTTVTVSS |
| hzCAR123- | 2577 | EVVLTQSPATLSLSPGERATLSCRASKSISKDLAWYQQK |
| 22 scFv | | PGQAPRLLIYSGSTLQSGIPARFSGSGSGTDFTLTISSLEPEDFAVYYCQQHNKYPYTFG |
| | | GGTKVEIKGGGGSGGGGSGGGGSGGGGSEVQLVQSGAEVKKPGESLRISCKGSGYTFTSY |
| | | WMNWVRQMPGKGLEWMGRIDPYDSETHYNQKFKDHVTISVDKSISTAYLQWSSLKASDTA |
| | | MYYCARGNWDDYWGQGTTVTVSS |
| hzCAR123- | 2578 | DVVMTQSPAFLSVTPGEKVTITCRASKSISKDLAWYQQK |
| 23 scFv | | PDQAPKLLIYSGSTLQSGVPSRFSGSGSGTDFTFTISSLEAEDAATYYCQQHNKYPYTFG |
| | | GGTKVEIKGGGGSGGGGSGGGGSGGGGSEVQLVQSGAEVKKPGESLRISCKGSGYTFTSY |
| | | WMNWVRQMPGKGLEWMGRIDPYDSETHYNQKFKDHVTISVDKSISTAYLQWSSLKASDTA |
| | | MYYCARGNWDDYWGQGTTVTVSS |
| hzCAR123- | 2579 | DVVMTQSPDSLAVSLGERATINCRASKSISKDLAWYQQK |
| 24 scFv | | PGQPPKLLIYSGSTLQSGVPDRFSGSGSGTDFTLTISSLQAEDVAVYYCQQHNKYPYTFG |
| | | GGTKVEIKGGGGSGGGGSGGGGSGGGGSEVQLVQSGAEVKKPGESLRISCKGSGYTFTSY |
| | | WMNWVRQMPGKGLEWMGRIDPYDSETHYNQKFKDHVTISVDKSISTAYLQWSSLKASDTA |
| | | MYYCARGNWDDYWGQGTTVTVSS |
| hzCAR123- | 2580 | EVQLVESGGGLVQPGGSLRLSCAASGYTFTSYWMNWVRQ |
| 25 scFv | | APGKGLVWVSRIDPYDSETHYNQKFKDRFTISVDKAKSTAYLQMNSLRAEDTAVYYCARG |
| | | NWDDYWGQGTTVTVSSGGGGSGGGGSGGGGSGGGGSDVQLTQSPSFLSASVGDRVTITCR |
| | | ASKSISKDLAWYQQKPGKAPKLLIYSGSTLQSGVPSRFSGSGSGTEFTLTISSLQPEDFA |
| | | TYYCQQHNKYPYTEGGGTKVEIK |
| hzCAR123- | 2581 | EVQLVESGGGLVQPGGSLRLSCAASGYTFTSYWMNWVRQ |
| 26 scFv | | APGKGLVWVSRIDPYDSETHYNQKFKDRFTISVDKAKSTAYLQMNSLRAEDTAVYYCARG |
| | | NWDDYWGQGTTVTVSSGGGGSGGGGSGGGGSGGGGSEVVLTQSPATLSLSPGERATLSCR |
| | | ASKSISKDLAWYQQKPGQAPRLLIYSGSTLQSGIPARFSGSGSGTDFTLTISSLEPEDFA |
| | | VYYCQQHNKYPYTEGGGTKVEIK |
| hzCAR123- | 2582 | EVQLVESGGGLVQPGGSLRLSCAASGYTFTSYWMNWVRQ |
| 27 scFv | | APGKGLVWVSRIDPYDSETHYNQKFKDRFTISVDKAKSTAYLQMNSLRAEDTAVYYCARG |
| | | NWDDYWGQGTTVTVSSGGGGSGGGGSGGGGSGGGGSDVVMTQSPAFLSVTPGEKVTITCR |
| | | ASKSISKDLAWYQQKPDQAPKLLIYSGSTLQSGVPSRFSGSGSGTDFTFTISSLEAEDAA |
| | | TYYCQQHNKYPYTEGGGTKVEIK |
| hzCAR123- | 2583 | EVQLVESGGGLVQPGGSLRLSCAASGYTFTSYWMNWVRQ |
| 28 scFv | | APGKGLVWVSRIDPYDSETHYNQKFKDRFTISVDKAKSTAYLQMNSLRAEDTAVYYCARG |
| | | NWDDYWGQGTTVTVSSGGGGSGGGGSGGGGSGGGGSDVVMTQSPDSLAVSLGERATINCR |
| | | ASKSISKDLAWYQQKPGQPPKLLIYSGSTLQSGVPDRFSGSGSGTDFTLTISSLQAEDVA |
| | | VYYCQQHNKYPYTEGGGTKVEIK |
| hzCAR123- | 2584 | DVQLTQSPSFLSASVGDRVTITCRASKSISKDLAWYQQK |
| 29 scFv | | PGKAPKLLIYSGSTLQSGVPSRFSGSGSGTEFTLTISSLQPEDFATYYCQQHNKYPYTFG |
| | | GGTKVEIKGGGGSGGGGSGGGGSGGGGSEVQLVESGGGLVQPGGSLRLSCAASGYTFTSY |
| | | WMNWVRQAPGKGLVWVSRIDPYDSETHYNQKFKDRFTISVDKAKSTAYLQMNSLRAEDTA |
| | | VYYCARGNWDDYWGQGTTVTVSS |
| hzCAR123- | 2585 | EVVLTQSPATLSLSPGERATLSCRASKSISKDLAWYQQK |
| 30 scFv | | PGQAPRLLIYSGSTLQSGIPARFSGSGSGTDFTLTISSLEPEDFAVYYCQQHNKYPYTFG |
| | | GGTKVEIKGGGGSGGGGSGGGGSGGGGSEVQLVESGGGLVQPGGSLRLSCAASGYTFTSY |
| | | WMNWVRQAPGKGLVWVSRIDPYDSETHYNQKFKDRFTISVDKAKSTAYLQMNSLRAEDTA |
| | | VYYCARGNWDDYWGQGTTVTVSS |
| hzCAR123- | 2586 | DVVMTQSPAFLSVTPGEKVTITCRASKSISKDLAWYQQK |
| 31 scFv | | PDQAPKLLIYSGSTLQSGVPSRFSGSGSGTDFTFTISSLEAEDAATYYCQQHNKYPYTFG |
| | | GGTKVEIKGGGGSGGGGSGGGGSGGGGSEVQLVESGGGLVQPGGSLRLSCAASGYTFTSY |
| | | WMNWVRQAPGKGLVWVSRIDPYDSETHYNQKFKDRFTISVDKAKSTAYLQMNSLRAEDTA |
| | | VYYCARGNWDDYWGQGTTVTVSS |
| hzCAR123- | 2587 | DVVMTQSPDSLAVSLGERATINCRASKSISKDLAWYQQK |
| 32 scFv | | PGQPPKLLIYSGSTLQSGVPDRFSGSGSGTDFTLTISSLQAEDVAVYYCQQHNKYPYTFG |
| | | GGTKVEIKGGGGSGGGGSGGGGSGGGGSEVQLVESGGGLVQPGGSLRLSCAASGYTFTSY |
| | | WMNWVRQAPGKGLVWVSRIDPYDSETHYNQKFKDRFTISVDKAKSTAYLQMNSLRAEDTA |
| | | VYYCARGNWDDYWGQGTTVTVSS |

[0333] In one aspect, the antigen-binding domain of a CAR, e.g., the CAR expressed by a cell of the invention, binds to CD33, e.g., human CD33. Any known CD33 binding domain may be used in the invention. In one embodiment, an antigen binding domain against CD33 is an antigen binding portion, e.g., CDRs or VH and VL, of an antibody, antigen-binding fragment or CAR described in, e.g., PCT publication WO2016/014576, the contents of which are incorporated herein in their entirety. In one embodiment, an antigen binding domain against CD33 is an antigen binding portion of or derived from Gemtuzumab ozogamicin (e.g., comprising an antigen binding domain comprising one or more, e.g., one, two, or three, CDRs of the heavy chain variable domain and/or one or more, e.g., one, two, or three, CDRs of the light chain variable domain, or the VH or VL, or the scFv sequence, of the scFv sequence of Gemtuzumab ozogamicin) (previously marketed as Mylotarg), e.g., Bross et al., Clin Cancer Res 7(6):1490-1496 (2001) (Gemtuzumab Ozogamicin, hP67.6). In one embodiment, an antigen binding domain against CD33 is an antigen binding portion of or derived from (e.g., comprising an antigen binding domain comprising one or more, e.g., one, two, or three, CDRs of the heavy chain variable domain and/or one or more, e.g., one, two, or three, CDRs of the light chain variable domain, or the VH or VL, or the scFv sequence) of the scFv sequence encoded by GenBank reference no. AM402974.1 (See, Wang et al., Mol. Ther., vol. 23:1, pp. 184-191 (2015), hereby incorporated by reference. In one embodiment, an antigen binding domain against CD33 is an antigen binding portion, e.g., CDRs, of an antibody described in, e.g., Caron et al., Cancer Res 52(24):6761-6767 (1992) (Lintuzumab, HuM195), Lapusan et al., Invest New Drugs 30(3):1121-1131 (2012) (AVE9633), Aigner et al., Leukemia 27(5): 1107-1115 (2013) (AMG330, CD33 BiTE), Dutour et al., Adv hematol 2012:683065 (2012), and Pizzitola et al., Leukemia doi:10.1038/Lue.2014.62 (2014). In embodiments, the antigen binding domain is or is derived from a murine anti-human CD33 binding domain. In embodiments, the antigen binding domain is a humanized antibody or antibody fragment, e.g., scFv domain. In an embodiment, the antigen binding domain is a human antibody or antibody fragment that binds to human CD33. In embodiments, the antigen binding domain is an scFv domain which includes a light chain variable region (VL) and a heavy chain variable region (VH). The VL and VH may attached by a linker described herein, e.g., comprising the sequence GGGGSGGGGSGGGGS (SEQ ID NO: 30), and may be in any orientation, e.g., VL-linker-VH, or VH-linker-VL.

[0334] In one aspect, the antigen-binding domain of a CAR, e.g., the CAR expressed by a cell of the invention, binds to CLL-1, e.g., human CLL-1. Any known CLL-1 binding domain may be used in the invention. In one embodiment, an antigen binding domain against CLL-1 is an antigen binding portion, e.g., CDRs or VH and VL, of an antibody, antigen-binding fragment or CAR described in, e.g., PCT publication WO2016/014535, the contents of which are incorporated herein in their entirety. In one embodiment, an antigen binding domain against CLL-1 is an antigen binding portion, e.g., CDRs, of an antibody available from R&D, ebiosciences, Abcam, for example, PE-CLL1-hu Cat#353604 (BioLegend); and PE-CLL1 (CLEC12A) Cat#562566 (BD). In embodiments, the antigen binding domain is or is derived from a murine anti-human CLL-1 binding domain. In embodiments, the antigen binding domain is a humanized antibody or antibody fragment, e.g., scFv domain. In an embodiment, the antigen binding domain is a human antibody or antibody fragment that binds to human CLL-1. In embodiments, the antigen binding domain is an scFv domain which includes a light chain variable region (VL) and a heavy chain variable region (VH). The VL and VH may attached by a linker described herein, e.g., comprising the sequence GGGGSGGGGSGGGGS (SEQ ID NO: 30), and may be in any orientation, e.g., VL-linker-VH, or VH-linker-VL.

[0335] In one aspect, the antigen-binding domain of a CAR, e.g., the CAR expressed by a cell of the invention, binds to a B-cell antigen, e.g., a human B-cell antigen. Any known B-cell antigen binding domain may be used in the invention.

[0336] In an embodiment, the B cell antigen is an antigen that is preferentially or specifically expressed on the surface of the B cell. The antigen can be expressed on the surface of any one of the following types of B cells: progenitor B cells (e.g., pre-B cells or pro-B cells), early pro-B cells, late pro-B cells, large pre-B cells, small pre-B cells, immature B cells, e.g., naïve B cells, mature B cells, plama B cells, plasmablasts, memory B cells, B-1 cells, B-2 cells, marginal-zone B cells, follicular B cells, germinal center B cells, or regulatory B cells (Bregs).

[0337] The present disclosure provides CARs that can target the following B cell antigens: CD10, CD19, CD20, CD21, CD22, CD23, CD24, CD25, CD37, CD38, CD53, CD72, CD73, CD74, CD75, CD77, CD79a, CD79b, CD80, CD81, CD82, CD83, CD84, CD85, ROR1, BCMA, CD86, and CD179b. Other B cell antigens that can be targeted by a CAR described herein include: CD1a, CD1b, CD1c, CD1d, CD2, CD5, CD6, CD9, CD11a, CD11b, CD11c, CD17, CD18, CD26, CD27, CD29, CD30, CD31, CD32a, CD32b, CD35, CD38, CD39, CD40, CD44, CD45, CD45RA, CD45RB, CD45RC, CD45RO, CD46, CD47, CD48, CD49b, CD49c, CD49d, CD50, CD52, CD54, CD55, CD58, CD60a, CD62L, CD63, CD63, CD68 CD69, CD70, CD85E, CD85I, CD85J, CD92, CD95, CD97, CD98, CD99, CD100, CD102, CD108, CD119, CD120a, CD120b, CD121b, CD122, CD124, CD125, CD126, CD130, CD132, CD137, CD138, CD139, CD147, CD148, CD150, CD152, CD162, CD164, CD166, CD167a, CD170, CD175, CD175s, CD180, CD184, CD185, CD192, CD196, CD197, CD200, CD205, CD210a, CDw210b, CD212, CD213a1, CD213a2, CD215, CD217, CD218a, CD218b, CD220, CD221, CD224, CD225, CD226, CD227, CD229, CD230, CD232, CD252, CD253, CD257, CD258, CD261, CD262, CD263, CD264, CD267, CD268, CD269, CD270, CD272, CD274, CD275, CD277, CD279, CD283, CD289, CD290, CD295, CD298, CD300a, CD300c, CD305, CD306, CD307a, CD307b, CD307c, CD307d, CD307e, CD314, CD315, CD316, CD317, CD319, CD321, CD327, CD328, CD329, CD338, CD351, CD352, CD353, CD354, CD355, CD357, CD358, CD360, CD361, CD362, and CD363.

[0338] In another embodiment, the B cell antigen targeted by the CAR is chosen from CD19, BCMA, CD20, CD22, FcRn5, FcRn2, CS-1 and CD138. In an embodiment, the B-Cell antigen targeted by the CAR is CD19. In an embodiment, the B-Cell antigen targeted by the CAR is CD20. In an embodiment, the B-Cell antigen targeted by the CAR is CD22. In an embodiment, the B-Cell antigen targeted by the CAR is BCMA. In an embodiment, the B-Cell antigen targeted by the CAR is FcRn5. In an embodiment, the B-Cell antigen targeted by the CAR is FcRn2. In an embodiment, the B-Cell antigen targeted by the CAR is CS-1. In an embodiment, the B-Cell antigen targeted by the CAR is CD138.

[0339] In one embodiment, the antigen-binding domain of a CAR, e.g., the CAR expressed by a cell of the invention, can be chosen such that a preferred B cell population is targeted. For example, in an embodiment where targeting of B regulatory cells is desired, an antigen binding domain is selected that targets a B cell antigen that is expressed on regulatory B cells and not on other B cell populations, e.g., plasma B cells and memory B cells. Cell surface markers expressed on regulatory B cells include: CD19, CD24, CD25, CD38, or CD86, or markers described in He et al., 2014, J Immunology Research, Article ID 215471. When targeting of more than one type of B cells is desired, an antigen binding domain that targets a B cell antigen that is expressed by all of the B cells to be targeted can be selected.

[0340] In an embodiment, the antigen-binding domain of a CAR, e.g., the CAR expressed by a cell of the invention, binds to CD19. CD19 is found on B cells throughout differentiation of the lineage from the pro/pre-B cell stage through the terminally differentiated plasma cell stage. In an embodiment, the antigen binding domain is a murine scFv domain that binds to human CD19, e.g., CTL019 (e.g., SEQ ID NO: 95). In an embodiment, the antigen binding domain is a humanized antibody or antibody fragment, e.g., scFv domain, derived from the murine CTL019 scFv. In an embodiment, the antigen binding domain is a human antibody or antibody fragment that binds to human CD19. Exemplary scFv domains (and their sequences, e.g., CDRs, VL and VH sequences) that bind to CD19 are provided in Table 6. The scFv domain sequences provided in Table 6 include a light chain variable region (VL) and a heavy chain variable region (VH). The VL and VH are attached by a linker comprising the sequence GGGGSGGGGSGGGGS (SEQ ID NO: 30), e.g., in the following orientation: VL-linker-VH.

TABLE 6
Antigen Binding domains that bind B cell antigen CD19

| | | | SEQ |
|---|---|---|---|
| B cell | | | ID |
| antigen | Name | Amino Acid Sequence | NO: |
| CD19 | muCTL019 | DIQMTQTTSSLSASLGDRVTISCRASQDISKYLNWYQQKPDGTVKLLIY | 95 |
| | | HTSRLHSGVPSRFSGSGSGTDYSLTISNLEQEDIATYFCQQGNTLPYTF | |
| | | GGGTKLEITGGGGSGGGGSGGGGSEVKLQESGPGLVAPSQSLSVTCTVS | |
| | | GVSLPDYGVSWIRQPPRKGLEWLGVIWGSETTYYNSALKSRLTIIKDNS | |
| | | KSQVFLKMNSLQTDDTAIYYCAKHYYYGGSYAMDYWGQGTSVTVSS | |
| CD19 | huscFv1 | EIVMTQSPATLSLSPGERATLSCRASQDISKYLNWYQQKPGQAPRLLIY | 83 |
| | | HTSRLHSGIPARFSGSGSGTDYTLTISSLQPEDFAVYFCQQGNTLPYTF | |
| | | GQGTKLEIKGGGGSGGGGSGGGGSQVQLQESGPGLVKPSETLSLTCTVS | |
| | | GVSLPDYGVSWIRQPPGKGLEWIGVIWGSETTYYSSSLKSRVTISKDNS | |
| | | KNQVSLKLSSVTAADTAVYYCAKHYYYGGSYAMDYWGQGTLVTVSS | |
| CD19 | huscFv2 | EIVMTQSPATLSLSPGERATLSCRASQDISKYLNWYQQKPGQAPRLLIY | 84 |
| | | HTSRLHSGIPARFSGSGSGTDYTLTISSLQPEDFAVYFCQQGNTLPYTF | |
| | | GQGTKLEIKGGGGSGGGGSGGGGSQVQLQESGPGLVKPSETLSLTCTVS | |
| | | GVSLPDYGVSWIRQPPGKGLEWIGVIWGSETTYYQSSLKSRVTISKDNS | |
| | | KNQVSLKLSSVTAADTAVYYCAKHYYYGGSYAMDYWGQGTLVTVSS | |
| CD19 | huscFv3 | QVQLQESGPGLVKPSETLSLTCTVSGVSLPDYGVSWIRQPPGKGLEWIG | 85 |
| | | VIWGSETTYYSSSLKSRVTISKDNSKNQVSLKLSSVTAADTAVYYCAKH | |
| | | YYYGGSYAMDYWGQGTLVTVSSGGGGSGGGGSGGGGSEIVMTQSPATLS | |
| | | LSPGERATLSCRASQDISKYLNWYQQKPGQAPRLLIYHTSRLHSGIPAR | |
| | | FSGSGSGTDYTLTISSLQPEDFAVYFCQQGNTLPYTFGQGTKLEIK | |
| CD19 | huscFv4 | QVQLQESGPGLVKPSETLSLTCTVSGVSLPDYGVSWIRQPPGKGLEWIG | 86 |
| | | VIWGSETTYYQSSLKSRVTISKDNSKNQVSLKLSSVTAADTAVYYCAKH | |
| | | YYYGGSYAMDYWGQGTLVTVSSGGGGSGGGGSGGGGSEIVMTQSPATLS | |
| | | LSPGERATLSCRASQDISKYLNWYQQKPGQAPRLLIYHTSRLHSGIPAR | |
| | | FSGSGSGTDYTLTISSLQPEDFAVYFCQQGNTLPYTFGQGTKLEIK | |
| CD19 | huscFv5 | EIVMTQSPATLSLSPGERATLSCRASQDISKYLNWYQQKPGQAPRLLIY | 87 |
| | | HTSRLHSGIPARFSGSGSGTDYTLTISSLQPEDFAVYFCQQGNTLPYTF | |
| | | GQGTKLEIKGGGGSGGGGSGGGGSGGGGSQVQLQESGPGLVKPSETLSL | |
| | | TCTVSGVSLPDYGVSWIRQPPGKGLEWIGVIWGSETTYYSSSLKSRVTI | |
| | | SKDNSKNQVSLKLSSVTAADTAVYYCAKHYYYGGSYAMDYWGQGTLVTV | |
| | | SS | |
| CD19 | huscFv6 | EIVMTQSPATLSLSPGERATLSCRASQDISKYLNWYQQKPGQAPRLLIY | 88 |
| | | HTSRLHSGIPARFSGSGSGTDYTLTISSLQPEDFAVYFCQQGNTLPYTF | |
| | | GQGTKLEIKGGGGSGGGGSGGGGSGGGGSQVQLQESGPGLVKPSETLSL | |
| | | TCTVSGVSLPDYGVSWIRQPPGKGLEWIGVIWGSETTYYQSSLKSRVTI | |
| | | SKDNSKNQVSLKLSSVTAADTAVYYCAKHYYYGGSYAMDYWGQGTLVTV | |
| | | SS | |
| CD19 | huscFv7 | QVQLQESGPGLVKPSETLSLTCTVSGVSLPDYGVSWIRQPPGKGLEWIG | 89 |
| | | VIWGSETTYYSSSLKSRVTISKDNSKNQVSLKLSSVTAADTAVYYCAKH | |
| | | YYYGGSYAMDYWGQGTLVTVSSGGGGSGGGGSGGGGSGGGGSEIVMTQS | |
| | | PATLSLSPGERATLSCRASQDISKYLNWYQQKPGQAPRLLIYHTSRLHS | |
| | | GIPARFSGSGSGTDYTLTISSLQPEDFAVYFCQQGNTLPYTFGQGTKLE | |
| | | IK | |
| CD19 | huscFv8 | QVQLQESGPGLVKPSETLSLTCTVSGVSLPDYGVSWIRQPPGKGLEWIG | 90 |
| | | VIWGSETTYYQSSLKSRVTISKDNSKNQVSLKLSSVTAADTAVYYCAKH | |
| | | YYYGGSYAMDYWGQGTLVTVSSGGGGSGGGGSGGGGSGGGGSEIVMTQS | |
| | | PATLSLSPGERATLSCRASQDISKYLNWYQQKPGQAPRLLIYHTSRLHS | |
| | | GIPARFSGSGSGTDYTLTISSLQPEDFAVYFCQQGNTLPYTFGQGTKLE | |
| | | IK | |
| CD19 | huscFv9 | EIVMTQSPATLSLSPGERATLSCRASQDISKYLNWYQQKPGQAPRLLIY | 91 |
| | | HTSRLHSGIPARFSGSGSGTDYTLTISSLQPEDFAVYFCQQGNTLPYTF | |
| | | GQGTKLEIKGGGGSGGGGSGGGGSGGGGSQVQLQESGPGLVKPSETLSL | |
| | | TCTVSGVSLPDYGVSWIRQPPGKGLEWIGVIWGSETTYYNSSLKSRVTI | |
| | | SKDNSKNQVSLKLSSVTAADTAVYYCAKHYYYGGSYAMDYWGQGTLVTV | |
| | | SS | |
| CD19 | HuscFv10 | QVQLQESGPGLVKPSETLSLTCTVSGVSLPDYGVSWIRQPPGKGLEWIG | 92 |
| | | VIWGSETTYYNSSLKSRVTISKDNSKNQVSLKLSSVTAADTAVYYCAKH | |
| | | YYYGGSYAMDYWGQGTLVTVSSGGGGSGGGGSGGGGSGGGGSEIVMTQS | |
| | | PATLSLSPGERATLSCRASQDISKYLNWYQQKPGQAPRLLIYHTSRLHS | |
| | | GIPARFSGSGSGTDYTLTISSLQPEDFAVYFCQQGNTLPYTFGQGTKLE | |
| | | IK | |
| CD19 | HuscFv11 | EIVMTQSPATLSLSPGERATLSCRASQDISKYLNWYQQKPGQAPRLLIY | 93 |
| | | HTSRLHSGIPARFSGSGSGTDYTLTISSLQPEDFAVYFCQQGNTLPYTF | |
| | | GQGTKLEIKGGGGSGGGGSGGGGSQVQLQESGPGLVKPSETLSLTCTVS | |
| | | GVSLPDYGVSWIRQPPGKGLEWIGVIWGSETTYYNSSLKSRVTISKDNS | |
| | | KNQVSLKLSSVTAADTAVYYCAKHYYYGGSYAMDYWGQGTLVTVSS | |
| CD19 | HuscFv12 | QVQLQESGPGLVKPSETLSLTCTVSGVSLPDYGVSWIRQPPGKGLEWIG | 94 |
| | | VIWGSETTYYNSSLKSRVTISKDNSKNQVSLKLSSVTAADTAVYYCAKH | |
| | | YYYGGSYAMDYWGQGTLVTVSSGGGGSGGGGSGGGGSEIVMTQSPATLS | |
| | | LSPGERATLSCRASQDISKYLNWYQQKPGQAPRLLIYHTSRLHSGIPAR | |
| | | FSGSGSGTDYTLTISSLQPEDFAVYFCQQGNTLPYTFGQGTKLEIK | |

[0341] The sequences of the CDR sequences of the scFv domains of the CD19 antigen binding domains provided in Table 6 are shown in Table 7 for the heavy chain variable domains and in Table 8 for the light chain variable domains. “ID” stands for the respective SEQ ID NO for each CDR.

TABLE 7
Heavy Chain Variable Domain CDRs

| | | | SEQ | | SEQ | | SEQ |
|---|---|---|---|---|---|---|---|
| | | | ID | | ID | | ID |
| Description | FW | HCDR1 | NO: | HCDR2 | NO: | HCDR3 | NO: |
| murine_CART 19 | | GVSLPDYGVS | 255 | VIWGSETTYYNSALKS | 256 | HYYYGGSYAMDY | 260 |
| humanized_CART19 a | VH4 | GVSLPDYGVS | 255 | VIWGSETTYY [symbol] S [symbol] LKS | 257 | HYYYGGSYAMDY | 260 |
| humanized_CART19 b | VH4 | GVSLPDYGVS | 255 | VIWGSETTYY [symbol] S [symbol] LKS | 258 | HYYYGGSYAMDY | 260 |
| humanized_CART19 c | VH4 | GVSLPDYGVS | 255 | VIWGSETTYYNS [symbol] LKS | 259 | HYYYGGSYAMDY | 260 |

TABLE 8
Light Chain Variable Domain CDRs

| | | | SEQ | | SEQ | | SEQ |
|---|---|---|---|---|---|---|---|
| | | | ID | | ID | | ID |
| Description | FW | LCDR1 | NO: | LCDR2 | NO: | LCDR3 | NO: |
| murine_CART19 | | RASQDISKYLN | 261 | HTSRLHS | 262 | QQGNTLPYT | 263 |
| humanized_CART19 a | VK3 | RASQDISKYLN | 261 | HTSRLHS | 262 | QQGNTLPYT | 263 |
| humanized_CART19 b | VK3 | RASQDISKYLN | 261 | HTSRLHS | 262 | QQGNTLPYT | 263 |
| humanized_CART19 c | VK3 | RASQDISKYLN | 261 | HTSRLHS | 262 | QQGNTLPYT | 263 |

[0342] In an embodiment, the antigen binding domain comprises an anti-CD19 antibody, or fragment thereof, e.g., an scFv. For example, the antigen binding domain comprises a variable heavy chain and a variable light chain listed in Table 9. The linker sequence joining the variable heavy and variable light chains can be any of the linker sequences described herein, or alternatively, can be GSTSGSGKPGSGEGSTKG (SEQ ID NO: 81). The light chain variable region and heavy chain variable region of a scFv can be, e.g., in any of the following orientations: light chain variable region-linker-heavy chain variable region or heavy chain variable region-linker-light chain variable region.

TABLE 9
Additional Anti-CD19 antibody binding domains

| Ab | | |
|---|---|---|
| Name | | |
| | VH Sequence | VL Sequence |
| SJ25-C1 | QVQLLESGAELVRPG | ELVLTQSPKFMSTSV |
| | SSVKISCKASGYAFS | GDRVSVTCKASQNVG |
| | SYWMNWVKQRPGQGL | TNVAWYQQKPGQSPK |
| | EWIGQIYPGDGDTNY | PLIYSATYRNSGVPD |
| | NGKFKGQATLTADKS | RFTGSGSGTDFTLTI |
| | SSTAYMQLSGLTSED | TNVQSKDLADYFYFC |
| | SAVYSCARKTISSVV | QYNRYPYTSGGGTKL |
| | DFYFDYWGQGTTVT | EIKRRS |
| | (SEQ ID NO: 96) | (SEQ ID NO: 97) |

| | ScFv Sequence |
|---|---|
| SJ25-C1 | QVQLLESGAELVRPGSSVKISCKASGYAFSSYW |
| scFv | MNWVKQRPGQGLEWIGQIYPGDGDTNYNGKFKG |
| | QATLTADKSSSTAYMQLSGLTSEDSAVYSCARK |
| | TISSVVDFYFDYWGQGTTVTGSTSGSGKPGSGE |
| | GSTKGELVLTQSPKFMSTSVGDRVSVTCKASQN |
| | VGTNVAWYQQKPGQSPKPLIYSATYRNSGVPDR |
| | FTGSGSGTDFTLTITNVQSKDLADYFYFCQYNR |
| | YPYTSGGGTKLEIKRRS (SEQ ID NO: 112) |

[0343] In one embodiment, the CD19 binding domain comprises one or more (e.g., all three) light chain complementary determining region 1 (LC CDR1), light chain complementary determining region 2 (LC CDR2), and light chain complementary determining region 3 (LC CDR3) of a CD19 binding domain described herein, e.g., provided in Table 6 or 7, and/or one or more (e.g., all three) heavy chain complementary determining region 1 (HC CDR1), heavy chain complementary determining region 2 (HC CDR2), and heavy chain complementary determining region 3 (HC CDR3) of a CD19 binding domain described herein, e.g., provided in Table 6 or 8. In one embodiment, the CD19 binding domain comprises one, two, or all of LC CDR1, LC CDR2, and LC CDR3 of any amino acid sequences as provided in Table 8, incorporated herein by reference; and one, two or all of HC CDR1, HC CDR2, and HC CDR3 of any amino acid sequences as provided in Table 7.

[0344] In one embodiment, the CD19 antigen binding domain comprises:
[0345] (i) (a) a LC CDR1 amino acid sequence of SEQ ID NO: 261, a LC CDR2 amino acid sequence of SEQ ID NO: 262, and a LC CDR3 amino acid sequence of SEQ ID NO: 263; and
   [0346] (b) a HC CDR1 amino acid sequence of SEQ ID NO: 255, a HC CDR2 amino acid sequence of SEQ ID NO: 256, and a HC CDR3 amino acid sequence of SEQ ID NO: 260
[0347] (ii) (a) a LC CDR1 amino acid sequence of SEQ ID NO: 261, a LC CDR2 amino acid sequence of SEQ ID NO: 262, and a LC CDR3 amino acid sequence of SEQ ID NO: 263; and
   [0348] (b) a HC CDR1 amino acid sequence of SEQ ID NO: 255, a HC CDR2 amino acid sequence of SEQ ID NO: 257, and a HC CDR3 amino acid sequence of SEQ ID NO: 260;
[0349] (iii) (a) a LC CDR1 amino acid sequence of SEQ ID NO: 261, a LC CDR2 amino acid sequence of SEQ ID NO: 262, and a LC CDR3 amino acid sequence of SEQ ID NO: 263; and
   [0350] (b) a HC CDR1 amino acid sequence of SEQ ID NO: 255, a HC CDR2 amino acid sequence of SEQ ID NO: 258, and a HC CDR3 amino acid sequence of SEQ ID NO: 260; or
[0351] (iv) (a) a LC CDR1 amino acid sequence of SEQ ID NO: 261, a LC CDR2 amino acid sequence of SEQ ID NO: 262, and a LC CDR3 amino acid sequence of SEQ ID NO: 263; and
   [0352] (b) a HC CDR1 amino acid sequence of SEQ ID NO: 255, a HC CDR2 amino acid sequence of SEQ ID NO: 259, and a HC CDR3 amino acid sequence of SEQ ID NO: 260.

[0353] In one embodiment, the CD19 binding domain comprises a light chain variable region described herein (e.g., in Table 6 or 9) and/or a heavy chain variable region described herein (e.g., in Table 6 or 9). In one embodiment, the CD19 binding domain is a scFv comprising a light chain and a heavy chain of an amino acid sequence listed in Table 6 or 9. In an embodiment, the CD19 binding domain (e.g., an scFv) comprises: a light chain variable region comprising an amino acid sequence having at least one, two or three modifications (e.g., substitutions, e.g., conservative substitutions) but not more than 30, 20 or 10 modifications (e.g., substitutions, e.g., conservative substitutions) of an amino acid sequence of a light chain variable region provided in Table 6 or 9, or a sequence with 95-99% identity with an amino acid sequence provided in Table 6 or 9; and/or a heavy chain variable region comprising an amino acid sequence having at least one, two or three modifications (e.g., substitutions, e.g., conservative substitutions) but not more than 30, 20 or 10 modifications (e.g., substitutions, e.g., conservative substitutions) of an amino acid sequence of a heavy chain variable region provided in Table 6 or 9, or a sequence with 95-99% identity to an amino acid sequence provided in Table 6 or 9.

[0354] In one embodiment, the CD19 binding domain comprises an amino acid sequence selected from a group consisting of SEQ ID NO: 83; SEQ ID NO: 84, SEQ ID NO: 85; SEQ ID NO: 86; SEQ ID NO: 87; SEQ ID NO: 88; SEQ ID NO: 89, SEQ ID NO: 90, SEQ ID NO: 91, SEQ ID NO: 92, SEQ ID NO: 93, SEQ ID NO: 94, SEQ ID NO: 95, and SEQ ID NO: 112; or an amino acid sequence having at least one, two or three modifications (e.g., substitutions, e.g., conservative substitutions) but not more than 30, 20 or 10 modifications (e.g., substitutions, e.g., conservative substitutions) to any of the aforesaid sequences; or a sequence with 95-99% identity to any of the aforesaid sequences. In one embodiment, the CD19 binding domain is a scFv, and a light chain variable region comprising an amino acid sequence described herein, e.g., in Table 6 or 9, is attached to a heavy chain variable region comprising an amino acid sequence described herein, e.g., in Table 6 or 9, via a linker, e.g., a linker described herein. In one embodiment, the CD19 binding domain includes a (Gly₄-Ser)ₙ linker, wherein n is 1, 2, 3, 4, 5, or 6, preferably 4 (SEQ ID NO: 80). The light chain variable region and heavy chain variable region of a scFv can be, e.g., in any of the following orientations: light chain variable region-linker-heavy chain variable region or heavy chain variable region-linker-light chain variable region.

[0355] Any known CD19 CAR, e.g., the CD19 antigen binding domain of any known CD19 CAR, in the art can be used in accordance with the instant invention to construct a CAR. For example, CD19 CAR is described in the U.S. Pat. Nos. 8,399,645; 7,446,190; Xu et al., Leuk Lymphoma. 2013 54(2):255-260(2012); Cruz et al., Blood 122(17):2965-2973 (2013); Brentjens et al., Blood, 118(18):4817-4828 (2011); Kochenderfer et al., Blood 116(20):4099-102 (2010); Kochenderfer et al., Blood 122 (25):4129-39(2013); and 16th Annu Meet Am Soc Gen Cell Ther (ASGCT) (May 15-18, Salt Lake City) 2013, Abst 10, each of which is incorporated herein by referene in its entirety. In one embodiment, an antigen binding domain against CD19 is an antigen binding portion, e.g., CDRs, of a CAR, antibody or antigen-binding fragment thereof described in, e.g., PCT publication WO2012/079000; PCT publication WO2014/153270; Kochenderfer, J. N. et al., J. Immunother. 32 (7), 689-702 (2009); Kochenderfer, J. N., et al., Blood, 116 (20), 4099-4102 (2010); PCT publication WO2014/031687; Bejcek, Cancer Research, 55, 2346-2351, 1995; or U.S. Pat. No. 7,446,190, each of which is incorporated herein by referene in its entirety.

[0356] In an embodiment, the antigen-binding domain of a CAR, e.g., the CAR expressed by a cell of the invention, binds to BCMA. BCMA is found preferentially expressed in mature B lymphocytes. In an embodiment, the antigen binding domain is a murine scFv domain that binds to human BCMA. In an embodiment, the antigen binding domain is a humanized antibody or antibody fragment, e.g., scFv domain, that binds human BCMA. In an embodiment, the antigen binding domain is a human antibody or antibody fragment that binds to human BCMA. Exemplary scFv domains (and their sequences, e.g., CDRs, VL and VH sequences) that bind to BCMA are provided in Table 12, Table 13, Table 14 and Table 15. The scFv domain sequences provided in Table 12 and Table 13 include a light chain variable region (VL) and a heavy chain variable region (VH). The VL and VH are attached by a linker, e.g., in the following orientation: VH-linker-VL.

TABLE 12
Antigen Binding domains that bind the B-Cell antigen BCMA
The amino acid sequences variable heavy chain and variable
light chain sequences for each scFv is also provided.

| | | |
|---|---|---|
| | SEQ | |
| Name/ | ID | |
| Description | NO: | Sequence |

139109

| | | |
|---|---|---|
| 139109-aa | 349 | EVQLVESGGGLVQPGGSLRLSCAVSGFALSNHGMSWVRRAPGKGLEWVSG |
| ScFv domain | | IVYSGSTYYAASVKGRFTISRDNSRNTLYLQMNSLRPEDTAIYYCSAHGG |
| | | ESDVWGQGTTVTVSSASGGGGSGGRASGGGGSDIQLTQSPSSLSASVGDR |
| | | VTITCRASQSISSYLNWYQQKPGKAPKLLIYAASSLQSGVPSRFSGSGSG |
| | | TDFTLTISSLQPEDFATYYCQQSYSTPYTFGQGTKVEIK |
| 139109-nt | 364 | GAAGTGCAATTGGTGGAATCAGGGGGAGGACTTGTGCAGCCTGGAGGATC |
| ScFv domain | | GCTGAGACTGTCATGTGCCGTGTCCGGCTTTGCCCTGTCCAACCACGGGA |
| | | TGTCCTGGGTCCGCCGCGCGCCTGGAAAGGGCCTCGAATGGGTGTCGGGT |
| | | ATTGTGTACAGCGGTAGCACCTACTATGCCGCATCCGTGAAGGGGAGATT |
| | | CACCATCAGCCGGGACAACTCCAGGAACACTCTGTACCTCCAAATGAATT |
| | | CGCTGAGGCCAGAGGACACTGCCATCTACTACTGCTCCGCGCATGGCGGA |
| | | GAGTCCGACGTCTGGGGACAGGGGACCACCGTGACCGTGTCTAGCGCGTC |
| | | CGGCGGAGGCGGCAGCGGGGGTCGGGCATCAGGGGGCGGCGGATCGGACA |
| | | TCCAGCTCACCCAGTCCCCGAGCTCGCTGTCCGCCTCCGTGGGAGATCGG |
| | | GTCACCATCACGTGCCGCGCCAGCCAGTCGATTTCCTCCTACCTGAACTG |
| | | GTACCAACAGAAGCCCGGAAAAGCCCCGAAGCTTCTCATCTACGCCGCCT |
| | | CGAGCCTGCAGTCAGGAGTGCCCTCACGGTTCTCCGGCTCCGGTTCCGGT |
| | | ACTGATTTCACCCTGACCATTTCCTCCCTGCAACCGGAGGACTTCGCTAC |
| | | TTACTACTGCCAGCAGTCGTACTCCACCCCCTACACTTTCGGACAAGGCA |
| | | CCAAGGTCGAAATCAAG |
| 139109-aa | 379 | EVQLVESGGGLVQPGGSLRLSCAVSGFALSNHGMSWVRRAPGKGLEWVSG |
| VH | | IVYSGSTYYAASVKGRFTISRDNSRNTLYLQMNSLRPEDTAIYYCSAHGG |
| | | ESDVWGQGTTVTVSS |
| 139109-aa | 394 | DIQLTQSPSSLSASVGDRVTITCRASQSISSYLNWYQQKPGKAPKLLIYA |
| VL | | ASSLQSGVPSRFSGSGSGTDFTLTISSLQPEDFATYYCQQSYSTPYTFGQ |
| | | GTKVEIK |

139103

| | | |
|---|---|---|
| 139103-aa | 339 | QVQLVESGGGLVQPGRSLRLSCAASGFTFSNYAMSWVRQAPGKGLGWVSG |
| ScFv domain | | ISRSGENTYYADSVKGRFTISRDNSKNTLYLQMNSLRDEDTAVYYCARSP |
| | | AHYYGGMDVWGQGTTVTVSSASGGGGSGGRASGGGGSDIVLTQSPGTLSL |
| | | SPGERATLSCRASQSISSSFLAWYQQKPGQAPRLLIYGASRRATGIPDRF |
| | | SGSGSGTDFTLTISRLEPEDSAVYYCQQYHSSPSWTFGQGTKLEIK |
| 139103-nt | 354 | CAAGTGCAACTCGTGGAATCTGGTGGAGGACTCGTGCAACCCGGAAGATC |
| ScFv domain | | GCTTAGACTGTCGTGTGCCGCCAGCGGGTTCACTTTCTCGAACTACGCGA |
| | | TGTCCTGGGTCCGCCAGGCACCCGGAAAGGGACTCGGTTGGGTGTCCGGC |
| | | ATTTCCCGGTCCGGCGAAAATACCTACTACGCCGACTCCGTGAAGGGCCG |
| | | CTTCACCATCTCAAGGGACAACAGCAAAAACACCCTGTACTTGCAAATGA |
| | | ACTCCCTGCGGGATGAAGATACAGCCGTGTACTATTGCGCCCGGTCGCCT |
| | | GCCCATTACTACGGCGGAATGGACGTCTGGGGACAGGGAACCACTGTGAC |
| | | TGTCAGCAGCGCGTCGGGTGGCGGCGGCTCAGGGGGTCGGGCCTCCGGGG |
| | | GGGGAGGGTCCGACATCGTGCTGACCCAGTCCCCGGGAACCCTGAGCCTG |
| | | AGCCCGGGAGAGCGCGCGACCCTGTCATGCCGGGCATCCCAGAGCATTAG |
| | | CTCCTCCTTTCTCGCCTGGTATCAGCAGAAGCCCGGACAGGCCCCGAGGC |
| | | TGCTGATCTACGGCGCTAGCAGAAGGGCTACCGGAATCCCAGACCGGTTC |
| | | TCCGGCTCCGGTTCCGGGACCGATTTCACCCTTACTATCTCGCGCCTGGA |
| | | ACCTGAGGACTCCGCCGTCTACTACTGCCAGCAGTACCACTCATCCCCGT |
| | | CGTGGACGTTCGGACAGGGCACCAAGCTGGAGATTAAG |
| 139103-aa | 369 | QVQLVESGGGLVQPGRSLRLSCAASGFTFSNYAMSWVRQAPGKGLGWVSG |
| VH | | ISRSGENTYYADSVKGRFTISRDNSKNTLYLQMNSLRDEDTAVYYCARSP |
| | | AHYYGGMDVWGQGTTVTVSS |
| 139103-aa | 384 | DIVLTQSPGTLSLSPGERATLSCRASQSISSSFLAWYQQKPGQAPRLLIY |
| VL | | GASRRATGIPDRFSGSGSGTDFTLTISRLEPEDSAVYYCQQYHSSPSWTF |
| | | GQGTKLEIK |

139105

| | | |
|---|---|---|
| 139105-aa | 340 | QVQLVESGGGLVQPGRSLRLSCAASGFTFDDYAMHWVRQAPGKGLEWVSG |
| ScFv domain | | ISWNSGSIGYADSVKGRFTISRDNAKNSLYLQMNSLRAEDTALYYCSVHS |
| | | FLAYWGQGTLVTVSSASGGGGSGGRASGGGGSDIVMTQTPLSLPVTPGEP |
| | | ASISCRSSQSLLHSNGYNYLDWYLQKPGQSPQLLIYLGSNRASGVPDRFS |
| | | GSGSGTDFTLKISRVEAEDVGVYYCMQALQTPYTFGQGTKVEIK |
| 139105-nt | 355 | CAAGTGCAACTCGTCGAATCCGGTGGAGGTCTGGTCCAACCTGGTAGAAG |
| ScFv domain | | CCTGAGACTGTCGTGTGCGGCCAGCGGATTCACCTTTGATGACTATGCTA |
| | | TGCACTGGGTGCGGCAGGCCCCAGGAAAGGGCCTGGAATGGGTGTCGGGA |
| | | ATTAGCTGGAACTCCGGGTCCATTGGCTACGCCGACTCCGTGAAGGGCCG |
| | | CTTCACCATCTCCCGCGACAACGCAAAGAACTCCCTGTACTTGCAAATGA |
| | | ACTCGCTCAGGGCTGAGGATACCGCGCTGTACTACTGCTCCGTGCATTCC |
| | | TTCCTGGCCTACTGGGGACAGGGAACTCTGGTCACCGTGTCGAGCGCCTC |
| | | CGGCGGCGGGGGCTCGGGTGGACGGGCCTCGGGCGGAGGGGGGTCCGACA |
| | | TCGTGATGACCCAGACCCCGCTGAGCTTGCCCGTGACTCCCGGAGAGCCT |
| | | GCATCCATCTCCTGCCGGTCATCCCAGTCCCTTCTCCACTCCAACGGATA |
| | | CAACTACCTCGACTGGTACCTCCAGAAGCCGGGACAGAGCCCTCAGCTTC |
| | | TGATCTACCTGGGGTCAAATAGAGCCTCAGGAGTGCCGGATCGGTTCAGC |
| | | GGATCTGGTTCGGGAACTGATTTCACTCTGAAGATTTCCCGCGTGGAAGC |
| | | CGAGGACGTGGGCGTCTACTACTGTATGCAGGCGCTGCAGACCCCCTATA |
| | | CCTTCGGCCAAGGGACGAAAGTGGAGATCAAG |
| 139105-aa | 370 | QVQLVESGGGLVQPGRSLRLSCAASGFTFDDYAMHWVRQAPGKGLEWVSG |
| VH | | ISWNSGSIGYADSVKGRFTISRDNAKNSLYLQMNSLRAEDTALYYCSVHS |
| | | FLAYWGQGTLVTVSS |
| 139105-aa | 385 | DIVMTQTPLSLPVTPGEPASISCRSSQSLLHSNGYNYLDWYLQKPGQSPQ |
| VL | | LLIYLGSNRASGVPDRFSGSGSGTDFTLKISRVEAEDVGVYYCMQALQTP |
| | | YTFGQGTKVEIK |

139111

| | | |
|---|---|---|
| 139111-aa | 341 | EVQLLESGGGLVQPGGSLRLSCAVSGFALSNHGMSWVRRAPGKGLEWVSG |
| ScFv domain | | IVYSGSTYYAASVKGRFTISRDNSRNTLYLQMNSLRPEDTAIYYCSAHGG |
| | | ESDVWGQGTTVTVSSASGGGGSGGRASGGGGSDIVMTQTPLSLSVTPGQP |
| | | ASISCKSSQSLLRNDGKTPLYWYLQKAGQPPQLLIYEVSNRFSGVPDRFS |
| | | GSGSGTDFTLKISRVEAEDVGAYYCMQNIQFPSFGGGTKLEIK |
| 139111-nt | 356 | GAAGTGCAATTGTTGGAATCTGGAGGAGGACTTGTGCAGCCTGGAGGATC |
| ScFv domain | | ACTGAGACTTTCGTGTGCGGTGTCAGGCTTCGCCCTGAGCAACCACGGCA |
| | | TGAGCTGGGTGCGGAGAGCCCCGGGGAAGGGTCTGGAATGGGTGTCCGGG |
| | | ATCGTCTACTCCGGTTCAACTTACTACGCCGCAAGCGTGAAGGGTCGCTT |
| | | CACCATTTCCCGCGATAACTCCCGGAACACCCTGTACCTCCAAATGAACT |
| | | CCCTGCGGCCCGAGGACACCGCCATCTACTACTGTTCCGCGCATGGAGGA |
| | | GAGTCCGATGTCTGGGGACAGGGCACTACCGTGACCGTGTCGAGCGCCTC |
| | | GGGGGGAGGAGGCTCCGGCGGTCGCGCCTCCGGGGGGGGTGGCAGCGACA |
| | | TTGTGATGACGCAGACTCCACTCTCGCTGTCCGTGACCCCGGGACAGCCC |
| | | GCGTCCATCTCGTGCAAGAGCTCCCAGAGCCTGCTGAGGAACGACGGAAA |
| | | GACTCCTCTGTATTGGTACCTCCAGAAGGCTGGACAGCCCCCGCAACTGC |
| | | TCATCTACGAAGTGTCAAATCGCTTCTCCGGGGTGCCGGATCGGTTTTCC |
| | | GGCTCGGGATCGGGCACCGACTTCACCCTGAAAATCTCCAGGGTCGAGGC |
| | | CGAGGACGTGGGAGCCTACTACTGCATGCAAAACATCCAGTTCCCTTCCT |
| | | TCGGCGGCGGCACAAAGCTGGAGATTAAG |
| 139111-aa | 371 | EVQLLESGGGLVQPGGSLRLSCAVSGFALSNHGMSWVRRAPGKGLEWVSG |
| VH | | IVYSGSTYYAASVKGRFTISRDNSRNTLYLQMNSLRPEDTAIYYCSAHGG |
| | | ESDVWGQGTTVTVSS |
| 139111-aa | 386 | DIVMTQTPLSLSVTPGQPASISCKSSQSLLRNDGKTPLYWYLQKAGQPPQ |
| VL | | LLIYEVSNRFSGVPDRFSGSGSGTDFTLKISRVEAEDVGAYYCMQNIQFP |
| | | SFGGGTKLEIK |

139100

| | | |
|---|---|---|
| 139100-aa | 342 | QVQLVQSGAEVRKTGASVKVSCKASGYIFDNFGINWVRQAPGQGLEWMGW |
| ScFv domain | | INPKNNNTNYAQKFQGRVTITADESTNTAYMEVSSLRSEDTAVYYCARGP |
| | | YYYQSYMDVWGQGTMVTVSSASGGGGSGGRASGGGGSDIVMTQTPLSLPV |
| | | TPGEPASISCRSSQSLLHSNGYNYLNWYLQKPGQSPQLLIYLGSKRASGV |
| | | PDRFSGSGSGTDFTLHITRVGAEDVGVYYCMQALQTPYTFGQGTKLEIK |
| 139100-nt | 357 | CAAGTCCAACTCGTCCAGTCCGGCGCAGAAGTCAGAAAAACCGGTGCTAG |
| ScFv domain | | CGTGAAAGTGTCCTGCAAGGCCTCCGGCTACATTTTCGATAACTTCGGAA |
| | | TCAACTGGGTCAGACAGGCCCCGGGCCAGGGGCTGGAATGGATGGGATGG |
| | | ATCAACCCCAAGAACAACAACACCAACTACGCACAGAAGTTCCAGGGCCG |
| | | CGTGACTATCACCGCCGATGAATCGACCAATACCGCCTACATGGAGGTGT |
| | | CCTCCCTGCGGTCGGAGGACACTGCCGTGTATTACTGCGCGAGGGGCCCA |
| | | TACTACTACCAAAGCTACATGGACGTCTGGGGACAGGGAACCATGGTGAC |
| | | CGTGTCATCCGCCTCCGGTGGTGGAGGCTCCGGGGGGCGGGCTTCAGGAG |
| | | GCGGAGGAAGCGATATTGTGATGACCCAGACTCCGCTTAGCCTGCCCGTG |
| | | ACTCCTGGAGAACCGGCCTCCATTTCCTGCCGGTCCTCGCAATCACTCCT |
| | | GCATTCCAACGGTTACAACTACCTGAATTGGTACCTCCAGAAGCCTGGCC |
| | | AGTCGCCCCAGTTGCTGATCTATCTGGGCTCGAAGCGCGCCTCCGGGGTG |
| | | CCTGACCGGTTTAGCGGATCTGGGAGCGGCACGGACTTCACTCTCCACAT |
| | | CACCCGCGTGGGAGCGGAGGACGTGGGAGTGTACTACTGTATGCAGGCGC |
| | | TGCAGACTCCGTACACATTCGGACAGGGCACCAAGCTGGAGATCAAG |
| 139100-aa | 372 | QVQLVQSGAEVRKTGASVKVSCKASGYIFDNFGINWVRQAPGQGLEWMGW |
| VH | | INPKNNNTNYAQKFQGRVTITADESTNTAYMEVSSLRSEDTAVYYCARGP |
| | | YYYQSYMDVWGQGTMVTVSS |
| 139100-aa | 387 | DIVMTQTPLSLPVTPGEPASISCRSSQSLLHSNGYNYLNWYLQKPGQSPQ |
| VL | | LLIYLGSKRASGVPDRFSGSGSGTDFTLHITRVGAEDVGVYYCMQALQTP |
| | | YTFGQGTKLEIK |

139101

| | | |
|---|---|---|
| 139101-aa | 343 | QVQLQESGGGLVQPGGSLRLSCAASGFTFSSDAMTWVRQAPGKGLEWVSV |
| ScFv domain | | ISGSGGTTYYADSVKGRFTISRDNSKNTLYLQMNSLRAEDTAVYYCAKLD |
| | | SSGYYYARGPRYWGQGTLVTVSSASGGGGSGGRASGGGGSDIQLTQSPSS |
| | | LSASVGDRVTITCRASQSISSYLNWYQQKPGKAPKLLIYGASTLASGVPA |
| | | RFSGSGSGTHFTLTINSLQSEDSATYYCQQSYKRASFGQGTKVEIK |
| 139101-nt | 358 | CAAGTGCAACTTCAAGAATCAGGCGGAGGACTCGTGCAGCCCGGAGGATC |
| ScFv domain | | ATTGCGGCTCTCGTGCGCCGCCTCGGGCTTCACCTTCTCGAGCGACGCCA |
| | | TGACCTGGGTCCGCCAGGCCCCGGGGAAGGGGCTGGAATGGGTGTCTGTG |
| | | ATTTCCGGCTCCGGGGGAACTACGTACTACGCCGATTCCGTGAAAGGTCG |
| | | CTTCACTATCTCCCGGGACAACAGCAAGAACACCCTTTATCTGCAAATGA |
| | | ATTCCCTCCGCGCCGAGGACACCGCCGTGTACTACTGCGCCAAGCTGGAC |
| | | TCCTCGGGCTACTACTATGCCCGGGGTCCGAGATACTGGGGACAGGGAAC |
| | | CCTCGTGACCGTGTCCTCCGCGTCCGGCGGAGGAGGGTCGGGAGGGCGGG |
| | | CCTCCGGCGGCGGCGGTTCGGACATCCAGCTGACCCAGTCCCCATCCTCA |
| | | CTGAGCGCAAGCGTGGGCGACAGAGTCACCATTACATGCAGGGCGTCCCA |
| | | GAGCATCAGCTCCTACCTGAACTGGTACCAACAGAAGCCTGGAAAGGCTC |
| | | CTAAGCTGTTGATCTACGGGGCTTCGACCCTGGCATCCGGGGTGCCCGCG |
| | | AGGTTTAGCGGAAGCGGTAGCGGCACTCACTTCACTCTGACCATTAACAG |
| | | CCTCCAGTCCGAGGATTCAGCCACTTACTACTGTCAGCAGTCCTACAAGC |
| | | GGGCCAGCTTCGGACAGGGCACTAAGGTCGAGATCAAG |
| 139101-aa | 373 | QVQLQESGGGLVQPGGSLRLSCAASGFTFSSDAMTWVRQAPGKGLEWVSV |
| VH | | ISGSGGTTYYADSVKGRFTISRDNSKNTLYLQMNSLRAEDTAVYYCAKLD |
| | | SSGYYYARGPRYWGQGTLVTVSS |
| 139101-aa | 388 | DIQLTQSPSSLSASVGDRVTITCRASQSISSYLNWYQQKPGKAPKLLIYG |
| VL | | ASTLASGVPARFSGSGSGTHFTLTINSLQSEDSATYYCQQSYKRASFGQG |
| | | TKVEIK |

139102

| | | |
|---|---|---|
| 139102-aa | 344 | QVQLVQSGAEVKKPGASVKVSCKASGYTFSNYGITWVRQAPGQGLEWMGW |
| ScFv domain | | ISAYNGNTNYAQKFQGRVTMTRNTSISTAYMELSSLRSEDTAVYYCARGP |
| | | YYYYMDVWGKGTMVTVSSASGGGGSGGRASGGGGSEIVMTQSPLSLPVTP |
| | | GEPASISCRSSQSLLYSNGYNYVDWYLQKPGQSPQLLIYLGSNRASGVPD |
| | | RFSGSGSGTDFKLQISRVEAEDVGIYYCMQGRQFPYSFGQGTKVEIK |
| 139102-nt | 359 | CAAGTCCAACTGGTCCAGAGCGGTGCAGAAGTGAAGAAGCCCGGAGCGAG |
| ScFv domain | | CGTGAAAGTGTCCTGCAAGGCTTCCGGGTACACCTTCTCCAACTACGGCA |
| | | TCACTTGGGTGCGCCAGGCCCCGGGACAGGGCCTGGAATGGATGGGGTGG |
| | | ATTTCCGCGTACAACGGCAATACGAACTACGCTCAGAAGTTCCAGGGTAG |
| | | AGTGACCATGACTAGGAACACCTCCATTTCCACCGCCTACATGGAACTGT |
| | | CCTCCCTGCGGAGCGAGGACACCGCCGTGTACTATTGCGCCCGGGGACCA |
| | | TACTACTACTACATGGATGTCTGGGGGAAGGGGACTATGGTCACCGTGTC |
| | | ATCCGCCTCGGGAGGCGGCGGATCAGGAGGACGCGCCTCTGGTGGTGGAG |
| | | GATCGGAGATCGTGATGACCCAGAGCCCTCTCTCCTTGCCCGTGACTCCT |
| | | GGGGAGCCCGCATCCATTTCATGCCGGAGCTCCCAGTCACTTCTCTACTC |
| | | CAACGGCTATAACTACGTGGATTGGTACCTCCAAAAGCCGGGCCAGAGCC |
| | | CGCAGCTGCTGATCTACCTGGGCTCGAACAGGGCCAGCGGAGTGCCTGAC |
| | | CGGTTCTCCGGGTCGGGAAGCGGGACCGACTTCAAGCTGCAAATCTCGAG |
| | | AGTGGAGGCCGAGGACGTGGGAATCTACTACTGTATGCAGGGCCGCCAGT |
| | | TTCCGTACTCGTTCGGACAGGGCACCAAAGTGGAAATCAAG |
| 139102-aa | 374 | QVQLVQSGAEVKKPGASVKVSCKASGYTFSNYGITWVRQAPGQGLEWMGW |
| VH | | ISAYNGNTNYAQKFQGRVTMTRNTSISTAYMELSSLRSEDTAVYYCARGP |
| | | YYYYMDVWGKGTMVTVSS |
| 139102-aa | 389 | EIVMTQSPLSLPVTPGEPASISCRSSQSLLYSNGYNYVDWYLQKPGQSPQ |
| VL | | LLIYLGSNRASGVPDRFSGSGSGTDFKLQISRVEAEDVGIYYCMQGRQFP |
| | | YSFGQGTKVEIK |

139104

| | | |
|---|---|---|
| 139104-aa | 345 | EVQLLETGGGLVQPGGSLRLSCAVSGFALSNHGMSWVRRAPGKGLEWVSG |
| ScFv domain | | IVYSGSTYYAASVKGRFTISRDNSRNTLYLQMNSLRPEDTAIYYCSAHGG |
| | | ESDVWGQGTTVTVSSASGGGGSGGRASGGGGSEIVLTQSPATLSVSPGES |
| | | ATLSCRASQSVSSNLAWYQQKPGQAPRLLIYGASTRASGIPDRFSGSGSG |
| | | TDFTLTISSLQAEDVAVYYCQQYGSSLTFGGGTKVEIK |
| 139104-nt | 360 | GAAGTGCAATTGCTCGAAACTGGAGGAGGTCTGGTGCAACCTGGAGGATC |
| ScFv domain | | ACTTCGCCTGTCCTGCGCCGTGTCGGGCTTTGCCCTGTCCAACCATGGAA |
| | | TGAGCTGGGTCCGCCGCGCGCCGGGGAAGGGCCTCGAATGGGTGTCCGGC |
| | | ATCGTCTACTCCGGCTCCACCTACTACGCCGCGTCCGTGAAGGGCCGGTT |
| | | CACGATTTCACGGGACAACTCGCGGAACACCCTGTACCTCCAAATGAATT |
| | | CCCTTCGGCCGGAGGATACTGCCATCTACTACTGCTCCGCCCACGGTGGC |
| | | GAATCCGACGTCTGGGGCCAGGGAACCACCGTGACCGTGTCCAGCGCGTC |
| | | CGGGGGAGGAGGAAGCGGGGGTAGAGCATCGGGTGGAGGCGGATCAGAGA |
| | | TCGTGCTGACCCAGTCCCCCGCCACCTTGAGCGTGTCACCAGGAGAGTCC |
| | | GCCACCCTGTCATGCCGCGCCAGCCAGTCCGTGTCCTCCAACCTGGCTTG |
| | | GTACCAGCAGAAGCCGGGGCAGGCCCCTAGACTCCTGATCTATGGGGCGT |
| | | CGACCCGGGCATCTGGAATTCCCGATAGGTTCAGCGGATCGGGCTCGGGC |
| | | ACTGACTTCACTCTGACCATCTCCTCGCTGCAAGCCGAGGACGTGGCTGT |
| | | GTACTACTGTCAGCAGTACGGAAGCTCCCTGACTTTCGGTGGCGGGACCA |
| | | AAGTCGAGATTAAG |
| 139104-aa | 375 | EVQLLETGGGLVQPGGSLRLSCAVSGFALSNHGMSWVRRAPGKGLEWVSG |
| VH | | IVYSGSTYYAASVKGRFTISRDNSRNTLYLQMNSLRPEDTAIYYCSAHGG |
| | | ESDVWGQGTTVTVSS |
| 139104-aa | 390 | EIVLTQSPATLSVSPGESATLSCRASQSVSSNLAWYQQKPGQAPRLLIYG |
| VL | | ASTRASGIPDRFSGSGSGTDFTLTISSLQAEDVAVYYCQQYGSSLTFGGG |
| | | TKVEIK |

139106

| | | |
|---|---|---|
| 139106-aa | 346 | EVQLVETGGGLVQPGGSLRLSCAVSGFALSNHGMSWVRRAPGKGLEWVSG |
| ScFv domain | | IVYSGSTYYAASVKGRFTISRDNSRNTLYLQMNSLRPEDTAIYYCSAHGG |
| | | ESDVWGQGTTVTVSSASGGGGSGGRASGGGGSEIVMTQSPATLSVSPGER |
| | | ATLSCRASQSVSSKLAWYQQKPGQAPRLLMYGASIRATGIPDRFSGSGSG |
| | | TEFTLTISSLEPEDFAVYYCQQYGSSSWTFGQGTKVEIK |
| 139106-nt | 361 | GAAGTGCAATTGGTGGAAACTGGAGGAGGACTTGTGCAACCTGGAGGATC |
| ScFv domain | | ATTGAGACTGAGCTGCGCAGTGTCGGGATTCGCCCTGAGCAACCATGGAA |
| | | TGTCCTGGGTCAGAAGGGCCCCTGGAAAAGGCCTCGAATGGGTGTCAGGG |
| | | ATCGTGTACTCCGGTTCCACTTACTACGCCGCCTCCGTGAAGGGGCGCTT |
| | | CACTATCTCACGGGATAACTCCCGCAATACCCTGTACCTCCAAATGAACA |
| | | GCCTGCGGCCGGAGGATACCGCCATCTACTACTGTTCCGCCCACGGTGGA |
| | | GAGTCTGACGTCTGGGGCCAGGGAACTACCGTGACCGTGTCCTCCGCGTC |
| | | CGGCGGTGGAGGGAGCGGCGGCCGCGCCAGCGGCGGCGGAGGCTCCGAGA |
| | | TCGTGATGACCCAGAGCCCCGCTACTCTGTCGGTGTCGCCCGGAGAAAGG |
| | | GCGACCCTGTCCTGCCGGGCGTCGCAGTCCGTGAGCAGCAAGCTGGCTTG |
| | | GTACCAGCAGAAGCCGGGCCAGGCACCACGCCTGCTTATGTACGGTGCCT |
| | | CCATTCGGGCCACCGGAATCCCGGACCGGTTCTCGGGGTCGGGGTCCGGT |
| | | ACCGAGTTCACACTGACCATTTCCTCGCTCGAGCCCGAGGACTTTGCCGT |
| | | CTATTACTGCCAGCAGTACGGCTCCTCCTCATGGACGTTCGGCCAGGGGA |
| | | CCAAGGTCGAAATCAAG |
| 139106-aa | 376 | EVQLVETGGGLVQPGGSLRLSCAVSGFALSNHGMSWVRRAPGKGLEWVSG |
| VH | | IVYSGSTYYAASVKGRFTISRDNSRNTLYLQMNSLRPEDTAIYYCSAHGG |
| | | ESDVWGQGTTVTVSS |
| 139106-aa | 391 | EIVMTQSPATLSVSPGERATLSCRASQSVSSKLAWYQQKPGQAPRLLMYG |
| VL | | ASIRATGIPDRFSGSGSGTEFTLTISSLEPEDFAVYYCQQYGSSSWTFGQ |
| | | GTKVEIK |

139107

| | | |
|---|---|---|
| 139107-aa | 347 | EVQLVETGGGVVQPGGSLRLSCAVSGFALSNHGMSWVRRAPGKGLEWVSG |
| ScFv domain | | IVYSGSTYYAASVKGRFTISRDNSRNTLYLQMNSLRPEDTAIYYCSAHGG |
| | | ESDVWGQGTTVTVSSASGGGGSGGRASGGGGSEIVLTQSPGTLSLSPGER |
| | | ATLSCRASQSVGSTNLAWYQQKPGQAPRLLIYDASNRATGIPDRFSGGGS |
| | | GTDFTLTISRLEPEDFAVYYCQQYGSSPPWTFGQGTKVEIK |
| 139107-nt | 362 | GAAGTGCAATTGGTGGAGACTGGAGGAGGAGTGGTGCAACCTGGAGGAAG |
| ScFv domain | | CCTGAGACTGTCATGCGCGGTGTCGGGCTTCGCCCTCTCCAACCACGGAA |
| | | TGTCCTGGGTCCGCCGGGCCCCTGGGAAAGGACTTGAATGGGTGTCCGGC |
| | | ATCGTGTACTCGGGTTCCACCTACTACGCGGCCTCAGTGAAGGGCCGGTT |
| | | TACTATTAGCCGCGACAACTCCAGAAACACACTGTACCTCCAAATGAACT |
| | | CGCTGCGGCCGGAAGATACCGCTATCTACTACTGCTCCGCCCATGGGGGA |
| | | GAGTCGGACGTCTGGGGACAGGGCACCACTGTCACTGTGTCCAGCGCTTC |
| | | CGGCGGTGGTGGAAGCGGGGGACGGGCCTCAGGAGGCGGTGGCAGCGAGA |
| | | TTGTGCTGACCCAGTCCCCCGGGACCCTGAGCCTGTCCCCGGGAGAAAGG |
| | | GCCACCCTCTCCTGTCGGGCATCCCAGTCCGTGGGGTCTACTAACCTTGC |
| | | ATGGTACCAGCAGAAGCCCGGCCAGGCCCCTCGCCTGCTGATCTACGACG |
| | | CGTCCAATAGAGCCACCGGCATCCCGGATCGCTTCAGCGGAGGCGGATCG |
| | | GGCACCGACTTCACCCTCACCATTTCAAGGCTGGAACCGGAGGACTTCGC |
| | | CGTGTACTACTGCCAGCAGTATGGTTCGTCCCCACCCTGGACGTTCGGCC |
| | | AGGGGACTAAGGTCGAGATCAAG |
| 139107-aa | 377 | EVQLVETGGGVVQPGGSLRLSCAVSGFALSNHGMSWVRRAPGKGLEWVSG |
| VH | | IVYSGSTYYAASVKGRFTISRDNSRNTLYLQMNSLRPEDTAIYYCSAHGG |
| | | ESDVWGQGTTVTVSS |
| 139107-aa | 392 | EIVLTQSPGTLSLSPGERATLSCRASQSVGSTNLAWYQQKPGQAPRLLIY |
| VL | | DASNRATGIPDRFSGGGSGTDFTLTISRLEPEDFAVYYCQQYGSSPPWTF |
| | | GQGTKVEIK |

139108

| | | |
|---|---|---|
| 139108-aa | 348 | QVQLVESGGGLVKPGGSLRLSCAASGFTFSDYYMSWIRQAPGKGLEWVSY |
| ScFv domain | | ISSSGSTIYYADSVKGRFTISRDNAKNSLYLQMNSLRAEDTAVYYCARES |
| | | GDGMDVWGQGTTVTVSSASGGGGSGGRASGGGGSDIQMTQSPSSLSASVG |
| | | DRVTITCRASQSISSYLNWYQQKPGKAPKLLIYAASSLQSGVPSRFSGSG |
| | | SGTDFTLTISSLQPEDFATYYCQQSYTLAFGQGTKVDIK |
| 139108-nt | 363 | CAAGTGCAACTCGTGGAATCTGGTGGAGGACTCGTGAAACCTGGAGGATC |
| ScFv domain | | ATTGAGACTGTCATGCGCGGCCTCGGGATTCACGTTCTCCGATTACTACA |
| | | TGAGCTGGATTCGCCAGGCTCCGGGGAAGGGACTGGAATGGGTGTCCTAC |
| | | ATTTCCTCATCCGGCTCCACCATCTACTACGCGGACTCCGTGAAGGGGAG |
| | | ATTCACCATTAGCCGCGATAACGCCAAGAACAGCCTGTACCTTCAGATGA |
| | | ACTCCCTGCGGGCTGAAGATACTGCCGTCTACTACTGCGCAAGGGAGAGC |
| | | GGAGATGGGATGGACGTCTGGGGACAGGGTACCACTGTGACCGTGTCGTC |
| | | GGCCTCCGGCGGAGGGGGTTCGGGTGGAAGGGCCAGCGGCGGCGGAGGCA |
| | | GCGACATCCAGATGACCCAGTCCCCCTCATCGCTGTCCGCCTCCGTGGGC |
| | | GACCGCGTCACCATCACATGCCGGGCCTCACAGTCGATCTCCTCCTACCT |
| | | CAATTGGTATCAGCAGAAGCCCGGAAAGGCCCCTAAGCTTCTGATCTACG |
| | | CAGCGTCCTCCCTGCAATCCGGGGTCCCATCTCGGTTCTCCGGCTCGGGC |
| | | AGCGGTACCGACTTCACTCTGACCATCTCGAGCCTGCAGCCGGAGGACTT |
| | | CGCCACTTACTACTGTCAGCAAAGCTACACCCTCGCGTTTGGCCAGGGCA |
| | | CCAAAGTGGACATCAAG |
| 139108-aa | 378 | QVQLVESGGGLVKPGGSLRLSCAASGFTFSDYYMSWIRQAPGKGLEWVSY |
| VH | | ISSSGSTIYYADSVKGRFTISRDNAKNSLYLQMNSLRAEDTAVYYCARES |
| | | GDGMDVWGQGTTVTVSS |
| 139108-aa | 393 | DIQMTQSPSSLSASVGDRVTITCRASQSISSYLNWYQQKPGKAPKLLIYA |
| VL | | ASSLQSGVPSRFSGSGSGTDFTLTISSLQPEDFATYYCQQSYTLAFGQGT |
| | | KVDIK |

139110

| | | |
|---|---|---|
| 139110-aa | 350 | QVQLVQSGGGLVKPGGSLRLSCAASGFTFSDYYMSWIRQAPGKGLEWVSY |
| ScFv domain | | ISSSGNTIYYADSVKGRFTISRDNAKNSLYLQMNSLRAEDTAVYYCARST |
| | | MVREDYWGQGTLVTVSSASGGGGSGGRASGGGGSDIVLTQSPLSLPVTLG |
| | | QPASISCKSSESLVHNSGKTYLNWFHQRPGQSPRRLIYEVSNRDSGVPDR |
| | | FTGSGSGTDFTLKISRVEAEDVGVYYCMQGTHWPGTFGQGTKLEIK |
| 139110-nt | 365 | CAAGTGCAACTGGTGCAAAGCGGAGGAGGATTGGTCAAACCCGGAGGAAG |
| ScFv domain | | CCTGAGACTGTCATGCGCGGCCTCTGGATTCACCTTCTCCGATTACTACA |
| | | TGTCATGGATCAGACAGGCCCCGGGGAAGGGCCTCGAATGGGTGTCCTAC |
| | | ATCTCGTCCTCCGGGAACACCATCTACTACGCCGACAGCGTGAAGGGCCG |
| | | CTTTACCATTTCCCGCGACAACGCAAAGAACTCGCTGTACCTTCAGATGA |
| | | ATTCCCTGCGGGCTGAAGATACCGCGGTGTACTATTGCGCCCGGTCCACT |
| | | ATGGTCCGGGAGGACTACTGGGGACAGGGCACACTCGTGACCGTGTCCAG |
| | | CGCGAGCGGGGGTGGAGGCAGCGGTGGACGCGCCTCCGGCGGCGGCGGTT |
| | | CAGACATCGTGCTGACTCAGTCGCCCCTGTCGCTGCCGGTCACCCTGGGC |
| | | CAACCGGCCTCAATTAGCTGCAAGTCCTCGGAGAGCCTGGTGCACAACTC |
| | | AGGAAAGACTTACCTGAACTGGTTCCATCAGCGGCCTGGACAGTCCCCAC |
| | | GGAGGCTCATCTATGAAGTGTCCAACAGGGATTCGGGGGTGCCCGACCGC |
| | | TTCACTGGCTCCGGGTCCGGCACCGACTTCACCTTGAAAATCTCCAGAGT |
| | | GGAAGCCGAGGACGTGGGCGTGTACTACTGTATGCAGGGTACCCACTGGC |
| | | CTGGAACCTTTGGACAAGGAACTAAGCTCGAGATTAAG |
| 139110-aa | 380 | QVQLVQSGGGLVKPGGSLRLSCAASGFTFSDYYMSWIRQAPGKGLEWVSY |
| VH | | ISSSGNTIYYADSVKGRFTISRDNAKNSLYLQMNSLRAEDTAVYYCARST |
| | | MVREDYWGQGTLVTVSS |
| 139110-aa | 395 | DIVLTQSPLSLPVTLGQPASISCKSSESLVHNSGKTYLNWFHQRPGQSPR |
| VL | | RLIYEVSNRDSGVPDRFTGSGSGTDFTLKISRVEAEDVGVYYCMQGTHWP |
| | | GTFGQGTKLEIK |

139112

| | | |
|---|---|---|
| 139112-aa | 351 | QVQLVESGGGLVQPGGSLRLSCAVSGFALSNHGMSWVRRAPGKGLEWVSG |
| ScFv domain | | IVYSGSTYYAASVKGRFTISRDNSRNTLYLQMNSLRPEDTAIYYCSAHGG |
| | | ESDVWGQGTTVTVSSASGGGGSGGRASGGGGSDIRLTQSPSPLSASVGDR |
| | | VTITCQASEDINKFLNWYHQTPGKAPKLLIYDASTLQTGVPSRFSGSGSG |
| | | TDFTLTINSLQPEDIGTYYCQQYESLPLTFGGGTKVEIK |
| 139112-nt | 366 | CAAGTGCAACTCGTGGAATCTGGTGGAGGACTCGTGCAACCCGGTGGAAG |
| ScFv domain | | CCTTAGGCTGTCGTGCGCCGTCAGCGGGTTTGCTCTGAGCAACCATGGAA |
| | | TGTCCTGGGTCCGCCGGGCACCGGGAAAAGGGCTGGAATGGGTGTCCGGC |
| | | ATCGTGTACAGCGGGTCAACCTATTACGCCGCGTCCGTGAAGGGCAGATT |
| | | CACTATCTCAAGAGACAACAGCCGGAACACCCTGTACTTGCAAATGAATT |
| | | CCCTGCGCCCCGAGGACACCGCCATCTACTACTGCTCCGCCCACGGAGGA |
| | | GAGTCGGACGTGTGGGGCCAGGGAACGACTGTGACTGTGTCCAGCGCATC |
| | | AGGAGGGGGTGGTTCGGGCGGCCGGGCCTCGGGGGGAGGAGGTTCCGACA |
| | | TTCGGCTGACCCAGTCCCCGTCCCCACTGTCGGCCTCCGTCGGCGACCGC |
| | | GTGACCATCACTTGTCAGGCGTCCGAGGACATTAACAAGTTCCTGAACTG |
| | | GTACCACCAGACCCCTGGAAAGGCCCCCAAGCTGCTGATCTACGATGCCT |
| | | CGACCCTTCAAACTGGAGTGCCTAGCCGGTTCTCCGGGTCCGGCTCCGGC |
| | | ACTGATTTCACTCTGACCATCAACTCATTGCAGCCGGAAGATATCGGGAC |
| | | CTACTATTGCCAGCAGTACGAATCCCTCCCGCTCACATTCGGCGGGGGAA |
| | | CCAAGGTCGAGATTAAG |
| 139112-aa | 381 | QVQLVESGGGLVQPGGSLRLSCAVSGFALSNHGMSWVRRAPGKGLEWVSG |
| VH | | IVYSGSTYYAASVKGRFTISRDNSRNTLYLQMNSLRPEDTAIYYCSAHGG |
| | | ESDVWGQGTTVTVSS |
| 139112-aa | 396 | DIRLTQSPSPLSASVGDRVTITCQASEDINKFLNWYHQTPGKAPKLLIYD |
| VL | | ASTLQTGVPSRFSGSGSGTDFTLTINSLQPEDIGTYYCQQYESLPLTFGG |
| | | GTKVEIK |

139113

| | | |
|---|---|---|
| 139113-aa | 352 | EVQLVETGGGLVQPGGSLRLSCAVSGFALSNHGMSWVRRAPGKGLEWVSG |
| ScFv domain | | IVYSGSTYYAASVKGRFTISRDNSRNTLYLQMNSLRPEDTAIYYCSAHGG |
| | | ESDVWGQGTTVTVSSASGGGGSGGRASGGGGSETTLTQSPATLSVSPGER |
| | | ATLSCRASQSVGSNLAWYQQKPGQGPRLLIYGASTRATGIPARFSGSGSG |
| | | TEFTLTISSLQPEDFAVYYCQQYNDWLPVTFGQGTKVEIK |
| 139113-nt | 367 | GAAGTGCAATTGGTGGAAACTGGAGGAGGACTTGTGCAACCTGGAGGATC |
| ScFv domain | | ATTGCGGCTCTCATGCGCTGTCTCCGGCTTCGCCCTGTCAAATCACGGGA |
| | | TGTCGTGGGTCAGACGGGCCCCGGGAAAGGGTCTGGAATGGGTGTCGGGG |
| | | ATTGTGTACAGCGGCTCCACCTACTACGCCGCTTCGGTCAAGGGCCGCTT |
| | | CACTATTTCACGGGACAACAGCCGCAACACCCTCTATCTGCAAATGAACT |
| | | CTCTCCGCCCGGAGGATACCGCCATCTACTACTGCTCCGCACACGGCGGC |
| | | GAATCCGACGTGTGGGGACAGGGAACCACTGTCACCGTGTCGTCCGCATC |
| | | CGGTGGCGGAGGATCGGGTGGCCGGGCCTCCGGGGGCGGCGGCAGCGAGA |
| | | CTACCCTGACCCAGTCCCCTGCCACTCTGTCCGTGAGCCCGGGAGAGAGA |
| | | GCCACCCTTAGCTGCCGGGCCAGCCAGAGCGTGGGCTCCAACCTGGCCTG |
| | | GTACCAGCAGAAGCCAGGACAGGGTCCCAGGCTGCTGATCTACGGAGCCT |
| | | CCACTCGCGCGACCGGCATCCCCGCGAGGTTCTCCGGGTCGGGTTCCGGG |
| | | ACCGAGTTCACCCTGACCATCTCCTCCCTCCAACCGGAGGACTTCGCGGT |
| | | GTACTACTGTCAGCAGTACAACGATTGGCTGCCCGTGACATTTGGACAGG |
| | | GGACGAAGGTGGAAATCAAA |
| 139113-aa | 382 | EVQLVETGGGLVQPGGSLRLSCAVSGFALSNHGMSWVRRAPGKGLEWVSG |
| VH | | IVYSGSTYYAASVKGRFTISRDNSRNTLYLQMNSLRPEDTAIYYCSAHGG |
| | | ESDVWGQGTTVTVSS |
| 139113-aa | 397 | ETTLTQSPATLSVSPGERATLSCRASQSVGSNLAWYQQKPGQGPRLLIYG |
| VL | | ASTRATGIPARFSGSGSGTEFTLTISSLQPEDFAVYYCQQYNDWLPVTFG |
| | | QGTKVEIK |

139114

| | | |
|---|---|---|
| 139114-aa | 353 | EVQLVESGGGLVQPGGSLRLSCAVSGFALSNHGMSWVRRAPGKGLEWVSG |
| ScFv domain | | IVYSGSTYYAASVKGRFTISRDNSRNTLYLQMNSLRPEDTAIYYCSAHGG |
| | | ESDVWGQGTTVTVSSASGGGGSGGRASGGGGSEIVLTQSPGTLSLSPGER |
| | | ATLSCRASQSIGSSSLAWYQQKPGQAPRLLMYGASSRASGIPDRFSGSGS |
| | | GTDFTLTISRLEPEDFAVYYCQQYAGSPPFTFGQGTKVEIK |
| 139114-nt | 368 | GAAGTGCAATTGGTGGAATCTGGTGGAGGACTTGTGCAACCTGGAGGATC |
| ScFv domain | | ACTGAGACTGTCATGCGCGGTGTCCGGTTTTGCCCTGAGCAATCATGGGA |
| | | TGTCGTGGGTCCGGCGCGCCCCCGGAAAGGGTCTGGAATGGGTGTCGGGT |
| | | ATCGTCTACTCCGGGAGCACTTACTACGCCGCGAGCGTGAAGGGCCGCTT |
| | | CACCATTTCCCGCGATAACTCCCGCAACACCCTGTACTTGCAAATGAACT |
| | | CGCTCCGGCCTGAGGACACTGCCATCTACTACTGCTCCGCACACGGAGGA |
| | | GAATCCGACGTGTGGGGCCAGGGAACTACCGTGACCGTCAGCAGCGCCTC |
| | | CGGCGGCGGGGGCTCAGGCGGACGGGCTAGCGGCGGCGGTGGCTCCGAGA |
| | | TCGTGCTGACCCAGTCGCCTGGCACTCTCTCGCTGAGCCCCGGGGAAAGG |
| | | GCAACCCTGTCCTGTCGGGCCAGCCAGTCCATTGGATCATCCTCCCTCGC |
| | | CTGGTATCAGCAGAAACCGGGACAGGCTCCGCGGCTGCTTATGTATGGGG |
| | | CCAGCTCAAGAGCCTCCGGCATTCCCGACCGGTTCTCCGGGTCCGGTTCC |
| | | GGCACCGATTTCACCCTGACTATCTCGAGGCTGGAGCCAGAGGACTTCGC |
| | | CGTGTACTACTGCCAGCAGTACGCGGGGTCCCCGCCGTTCACGTTCGGAC |
| | | AGGGAACCAAGGTCGAGATCAAG |
| 139114-aa | 383 | EVQLVESGGGLVQPGGSLRLSCAVSGFALSNHGMSWVRRAPGKGLEWVSG |
| VH | | IVYSGSTYYAASVKGRFTISRDNSRNTLYLQMNSLRPEDTAIYYCSAHGG |
| | | ESDVWGQGTTVTVSS |
| 139114-aa | 398 | EIVLTQSPGTLSLSPGERATLSCRASQSIGSSSLAWYQQKPGQAPRLLMY |
| VL | | GASSRASGIPDRFSGSGSGTDFTLTISRLEPEDFAVYYCQQYAGSPPFTF |
| | | GQGTKVEIK |

149362

| | | |
|---|---|---|
| 149362-aa | 429 | QVQLQESGPGLVKPSETLSLTCTVSGGSISSSYYYWGWIRQPPGKGLEWI |
| ScFv domain | | GSIYYSGSAYYNPSLKSRVTISVDTSKNQFSLRLSSVTAADTAVYYCARH |
| | | WQEWPDAFDIWGQGTMVTVSSGGGGSGGGGSGGGGSETTLTQSPAFMSAT |
| | | PGDKVIISCKASQDIDDAMNWYQQKPGEAPLFIIQSATSPVPGIPPRFSG |
| | | SGFGTDFSLTINNIESEDAAYYFCLQHDNFPLTFGQGTKLEIK |
| 149362-nt | 450 | CAAGTGCAGCTTCAGGAAAGCGGACCGGGCCTGGTCAAGCCATCCGAAAC |
| ScFv domain | | TCTCTCCCTGACTTGCACTGTGTCTGGCGGTTCCATCTCATCGTCGTACT |
| | | ACTACTGGGGCTGGATTAGGCAGCCGCCCGGAAAGGGACTGGAGTGGATC |
| | | GGAAGCATCTACTATTCCGGCTCGGCGTACTACAACCCTAGCCTCAAGTC |
| | | GAGAGTGACCATCTCCGTGGATACCTCCAAGAACCAGTTTTCCCTGCGCC |
| | | TGAGCTCCGTGACCGCCGCTGACACCGCCGTGTACTACTGTGCTCGGCAT |
| | | TGGCAGGAATGGCCCGATGCCTTCGACATTTGGGGCCAGGGCACTATGGT |
| | | CACTGTGTCATCCGGGGGTGGAGGCAGCGGGGGAGGAGGGTCCGGGGGGG |
| | | GAGGTTCAGAGACAACCTTGACCCAGTCACCCGCATTCATGTCCGCCACT |
| | | CCGGGAGACAAGGTCATCATCTCGTGCAAAGCGTCCCAGGATATCGACGA |
| | | TGCCATGAATTGGTACCAGCAGAAGCCTGGCGAAGCGCCGCTGTTCATTA |
| | | TCCAATCCGCAACCTCGCCCGTGCCTGGAATCCCACCGCGGTTCAGCGGC |
| | | AGCGGTTTCGGAACCGACTTTTCCCTGACCATTAACAACATTGAGTCCGA |
| | | GGACGCCGCCTACTACTTCTGCCTGCAACACGACAACTTCCCTCTCACGT |
| | | TCGGCCAGGGAACCAAGCTGGAAATCAAG |
| 149362-aa | 471 | QVQLQESGPGLVKPSETLSLTCTVSGGSISSSYYYWGWIRQPPGKGLEWI |
| VH | | GSIYYSGSAYYNPSLKSRVTISVDTSKNQFSLRLSSVTAADTAVYYCARH |
| | | WQEWPDAFDIWGQGTMVTVSS |
| 149362-aa | 492 | ETTLTQSPAFMSATPGDKVIISCKASQDIDDAMNWYQQKPGEAPLFIIQS |
| VL | | ATSPVPGIPPRFSGSGFGTDFSLTINNIESEDAAYYFCLQHDNFPLTFGQ |
| | | GTKLEIK |

149363

| | | |
|---|---|---|
| 149363-aa | 430 | QVNLRESGPALVKPTQTLTLTCTFSGFSLRTSGMCVSWIRQPPGKALEWL |
| ScFv domain | | ARIDWDEDKFYSTSLKTRLTISKDTSDNQVVLRMTNMDPADTATYYCARS |
| | | GAGGTSATAFDIWGPGTMVTVSSGGGGSGGGGSGGGGSDIQMTQSPSSLS |
| | | ASVGDRVTITCRASQDIYNNLAWFQLKPGSAPRSLMYAANKSQSGVPSRF |
| | | SGSASGTDFTLTISSLQPEDFATYYCQHYYRFPYSFGQGTKLEIK |
| 149363-nt | 451 | CAAGTCAATCTGCGCGAATCCGGCCCCGCCTTGGTCAAGCCTACCCAGAC |
| ScFvd omain | | CCTCACTCTGACCTGTACTTTCTCCGGCTTCTCCCTGCGGACTTCCGGGA |
| | | TGTGCGTGTCCTGGATCAGACAGCCTCCGGGAAAGGCCCTGGAGTGGCTC |
| | | GCTCGCATTGACTGGGATGAGGACAAGTTCTACTCCACCTCACTCAAGAC |
| | | CAGGCTGACCATCAGCAAAGATACCTCTGACAACCAAGTGGTGCTCCGCA |
| | | TGACCAACATGGACCCAGCCGACACTGCCACTTACTACTGCGCGAGGAGC |
| | | GGAGCGGGCGGAACCTCCGCCACCGCCTTCGATATTTGGGGCCCGGGTAC |
| | | CATGGTCACCGTGTCAAGCGGAGGAGGGGGGTCCGGGGGCGGCGGTTCCG |
| | | GGGGAGGCGGATCGGACATTCAGATGACTCAGTCACCATCGTCCCTGAGC |
| | | GCTAGCGTGGGCGACAGAGTGACAATCACTTGCCGGGCATCCCAGGACAT |
| | | CTATAACAACCTTGCGTGGTTCCAGCTGAAGCCTGGTTCCGCACCGCGGT |
| | | CACTTATGTACGCCGCCAACAAGAGCCAGTCGGGAGTGCCGTCCCGGTTT |
| | | TCCGGTTCGGCCTCGGGAACTGACTTCACCCTGACGATCTCCAGCCTGCA |
| | | ACCCGAGGATTTCGCCACCTACTACTGCCAGCACTACTACCGCTTTCCCT |
| | | ACTCGTTCGGACAGGGAACCAAGCTGGAAATCAAG |
| 149363-aa | 472 | QVNLRESGPALVKPTQTLTLTCTFSGFSLRTSGMCVSWIRQPPGKALEWL |
| VH | | ARIDWDEDKFYSTSLKTRLTISKDTSDNQVVLRMTNMDPADTATYYCARS |
| | | GAGGTSATAFDIWGPGTMVTVSS |
| 149363-aa | 493 | DIQMTQSPSSLSASVGDRVTITCRASQDIYNNLAWFQLKPGSAPRSLMYA |
| VL | | ANKSQSGVPSRFSGSASGTDFTLTISSLQPEDFATYYCQHYYRFPYSFGQ |
| | | GTKLEIK |

149364

| | | |
|---|---|---|
| 149364-aa | 431 | EVQLVESGGGLVKPGGSLRLSCAASGFTFSSYSMNWVRQAPGKGLEWVSS |
| ScFv domain | | ISSSSSYIYYADSVKGRFTISRDNAKNSLYLQMNSLRAEDTAVYYCAKTI |
| | | AAVYAFDIWGQGTTVTVSSGGGGSGGGGSGGGGSEIVLTQSPLSLPVTPE |
| | | EPASISCRSSQSLLHSNGYNYLDWYLQKPGQSPQLLIYLGSNRASGVPDR |
| | | FSGSGSGTDFTLKISRVEAEDVGVYYCMQALQTPYTFGQGTKLEIK |
| 149364-nt | 452 | GAAGTGCAGCTTGTCGAATCCGGGGGGGGACTGGTCAAGCCGGGCGGATC |
| ScFv domain | | ACTGAGACTGTCCTGCGCCGCGAGCGGCTTCACGTTCTCCTCCTACTCCA |
| | | TGAACTGGGTCCGCCAAGCCCCCGGGAAGGGACTGGAATGGGTGTCCTCT |
| | | ATCTCCTCGTCGTCGTCCTACATCTACTACGCCGACTCCGTGAAGGGAAG |
| | | ATTCACCATTTCCCGCGACAACGCAAAGAACTCACTGTACTTGCAAATGA |
| | | ACTCACTCCGGGCCGAAGATACTGCTGTGTACTATTGCGCCAAGACTATT |
| | | GCCGCCGTCTACGCTTTCGACATCTGGGGCCAGGGAACCACCGTGACTGT |
| | | GTCGTCCGGTGGTGGTGGCTCGGGCGGAGGAGGAAGCGGCGGCGGGGGGT |
| | | CCGAGATTGTGCTGACCCAGTCGCCACTGAGCCTCCCTGTGACCCCCGAG |
| | | GAACCCGCCAGCATCAGCTGCCGGTCCAGCCAGTCCCTGCTCCACTCCAA |
| | | CGGATACAATTACCTCGATTGGTACCTTCAGAAGCCTGGACAAAGCCCGC |
| | | AGCTGCTCATCTACTTGGGATCAAACCGCGCGTCAGGAGTGCCTGACCGG |
| | | TTCTCCGGCTCGGGCAGCGGTACCGATTTCACCCTGAAAATCTCCAGGGT |
| | | GGAGGCAGAGGACGTGGGAGTGTATTACTGTATGCAGGCGCTGCAGACTC |
| | | CGTACACATTTGGGCAGGGCACCAAGCTGGAGATCAAG |
| 149364-aa | 473 | EVQLVESGGGLVKPGGSLRLSCAASGFTFSSYSMNWVRQAPGKGLEWVSS |
| VH | | ISSSSSYIYYADSVKGRFTISRDNAKNSLYLQMNSLRAEDTAVYYCAKTI |
| | | AAVYAFDIWGQGTTVTVSS |
| 149364-aa | 494 | EIVLTQSPLSLPVTPEEPASISCRSSQSLLHSNGYNYLDWYLQKPGQSPQ |
| VL | | LLIYLGSNRASGVPDRFSGSGSGTDFTLKISRVEAEDVGVYYCMQALQTP |
| | | YTFGQGTKLEIK |

149365

| | | |
|---|---|---|
| 149365-aa | 432 | EVQLVESGGGLVKPGGSLRLSCAASGFTFSDYYMSWIRQAPGKGLEWVSY |
| ScFv domain | | ISSSGSTIYYADSVKGRFTISRDNAKNSLYLQMNSLRAEDTAVYYCARDL |
| | | RGAFDIWGQGTMVTVSSGGGGSGGGGSGGGGSSYVLTQSPSVSAAPGYTA |
| | | TISCGGNNIGTKSVHWYQQKPGQAPLLVIRDDSVRPSKIPGRFSGSNSGN |
| | | MATLTISGVQAGDEADFYCQVWDSDSEHVVFGGGTKLTVL |
| 149365-nt | 453 | GAAGTCCAGCTCGTGGAGTCCGGCGGAGGCCTTGTGAAGCCTGGAGGTTC |
| ScFv domain | | GCTGAGACTGTCCTGCGCCGCCTCCGGCTTCACCTTCTCCGACTACTACA |
| | | TGTCCTGGATCAGACAGGCCCCGGGAAAGGGCCTGGAATGGGTGTCCTAC |
| | | ATCTCGTCATCGGGCAGCACTATCTACTACGCGGACTCAGTGAAGGGGCG |
| | | GTTCACCATTTCCCGGGATAACGCGAAGAACTCGCTGTATCTGCAAATGA |
| | | ACTCACTGAGGGCCGAGGACACCGCCGTGTACTACTGCGCCCGCGATCTC |
| | | CGCGGGGCATTTGACATCTGGGGACAGGGAACCATGGTCACAGTGTCCAG |
| | | CGGAGGGGGAGGATCGGGTGGCGGAGGTTCCGGGGGTGGAGGCTCCTCCT |
| | | ACGTGCTGACTCAGAGCCCAAGCGTCAGCGCTGCGCCCGGTTACACGGCA |
| | | ACCATCTCCTGTGGCGGAAACAACATTGGGACCAAGTCTGTGCACTGGTA |
| | | TCAGCAGAAGCCGGGCCAAGCTCCCCTGTTGGTGATCCGCGATGACTCCG |
| | | TGCGGCCTAGCAAAATTCCGGGACGGTTCTCCGGCTCCAACAGCGGCAAT |
| | | ATGGCCACTCTCACCATCTCGGGAGTGCAGGCCGGAGATGAAGCCGACTT |
| | | CTACTGCCAAGTCTGGGACTCAGACTCCGAGCATGTGGTGTTCGGGGGCG |
| | | GAACCAAGCTGACTGTGCTC |
| 149365-aa | 474 | EVQLVESGGGLVKPGGSLRLSCAASGFTFSDYYMSWIRQAPGKGLEWVSY |
| VH | | ISSSGSTIYYADSVKGRFTISRDNAKNSLYLQMNSLRAEDTAVYYCARDL |
| | | RGAFDIWGQGTMVTVSS |
| 149365-aa | 495 | SYVLTQSPSVSAAPGYTATISCGGNNIGTKSVHWYQQKPGQAPLLVIRDD |
| VL | | SVRPSKIPGRFSGSNSGNMATLTISGVQAGDEADFYCQVWDSDSEHVVFG |
| | | GGTKLTVL |

149366

| | | |
|---|---|---|
| 149366-aa | 433 | QVQLVQSGAEVKKPGASVKVSCKPSGYTVTSHYIHWVRRAPGQGLEWMGM |
| ScFv domain | | INPSGGVTAYSQTLQGRVTMTSDTSSSTVYMELSSLRSEDTAMYYCAREG |
| | | SGSGWYFDFWGRGTLVTVSSGGGGSGGGGSGGGGSSYVLTQPPSVSVSPG |
| | | QTASITCSGDGLSKKYVSWYQQKAGQSPVVLISRDKERPSGIPDRFSGSN |
| | | SADTATLTISGTQAMDEADYYCQAWDDTTVVFGGGTKLTVL |
| 149366-nt | 454 | CAAGTGCAGCTGGTGCAGAGCGGGGCCGAAGTCAAGAAGCCGGGAGCCTC |
| ScFv domain | | CGTGAAAGTGTCCTGCAAGCCTTCGGGATACACCGTGACCTCCCACTACA |
| | | TTCATTGGGTCCGCCGCGCCCCCGGCCAAGGACTCGAGTGGATGGGCATG |
| | | ATCAACCCTAGCGGCGGAGTGACCGCGTACAGCCAGACGCTGCAGGGACG |
| | | CGTGACTATGACCTCGGATACCTCCTCCTCCACCGTCTATATGGAACTGT |
| | | CCAGCCTGCGGTCCGAGGATACCGCCATGTACTACTGCGCCCGGGAAGGA |
| | | TCAGGCTCCGGGTGGTATTTCGACTTCTGGGGAAGAGGCACCCTCGTGAC |
| | | TGTGTCATCTGGGGGAGGGGGTTCCGGTGGTGGCGGATCGGGAGGAGGCG |
| | | GTTCATCCTACGTGCTGACCCAGCCACCCTCCGTGTCCGTGAGCCCCGGC |
| | | CAGACTGCATCGATTACATGTAGCGGCGACGGCCTCTCCAAGAAATACGT |
| | | GTCGTGGTACCAGCAGAAGGCCGGACAGAGCCCGGTGGTGCTGATCTCAA |
| | | GAGATAAGGAGCGGCCTAGCGGAATCCCGGACAGGTTCTCGGGTTCCAAC |
| | | TCCGCGGACACTGCTACTCTGACCATCTCGGGGACCCAGGCTATGGACGA |
| | | AGCCGATTACTACTGCCAAGCCTGGGACGACACTACTGTCGTGTTTGGAG |
| | | GGGGCACCAAGTTGACCGTCCTT |
| 149366-aa | 475 | QVQLVQSGAEVKKPGASVKVSCKPSGYTVTSHYIHWVRRAPGQGLEWMGM |
| VH | | INPSGGVTAYSQTLQGRVTMTSDTSSSTVYMELSSLRSEDTAMYYCAREG |
| | | SGSGWYFDFWGRGTLVTVSS |
| 149366-aa | 496 | SYVLTQPPSVSVSPGQTASITCSGDGLSKKYVSWYQQKAGQSPVVLISRD |
| VL | | KERPSGIPDRFSGSNSADTATLTISGTQAMDEADYYCQAWDDTTVVFGGG |
| | | TKLTVL |

149367

| | | |
|---|---|---|
| 149367-aa | 434 | QVQLQESGPGLVKPSQTLSLTCTVSGGSISSGGYYWSWIRQHPGKGLEWI |
| ScFv domain | | GYIYYSGSTYYNPSLKSRVTISVDTSKNQFSLKLSSVTAADTAVYYCARA |
| | | GIAARLRGAFDIWGQGTMVTVSSGGGGSGGGGSGGGGSDIVMTQSPSSVS |
| | | ASVGDRVIITCRASQGIRNWLAWYQQKPGKAPNLLIYAASNLQSGVPSRF |
| | | SGSGSGADFTLTISSLQPEDVATYYCQKYNSAPFTFGPGTKVDIK |
| 149367-nt | 455 | CAAGTGCAGCTTCAGGAGAGCGGCCCGGGACTCGTGAAGCCGTCCCAGAC |
| ScFv domain | | CCTGTCCCTGACTTGCACCGTGTCGGGAGGAAGCATCTCGAGCGGAGGCT |
| | | ACTATTGGTCGTGGATTCGGCAGCACCCTGGAAAGGGCCTGGAATGGATC |
| | | GGCTACATCTACTACTCCGGCTCGACCTACTACAACCCATCGCTGAAGTC |
| | | CAGAGTGACAATCTCAGTGGACACGTCCAAGAATCAGTTCAGCCTGAAGC |
| | | TCTCTTCCGTGACTGCGGCCGACACCGCCGTGTACTACTGCGCACGCGCT |
| | | GGAATTGCCGCCCGGCTGAGGGGTGCCTTCGACATTTGGGGACAGGGCAC |
| | | CATGGTCACCGTGTCCTCCGGCGGCGGAGGTTCCGGGGGTGGAGGCTCAG |
| | | GAGGAGGGGGGTCCGACATCGTCATGACTCAGTCGCCCTCAAGCGTCAGC |
| | | GCGTCCGTCGGGGACAGAGTGATCATCACCTGTCGGGCGTCCCAGGGAAT |
| | | TCGCAACTGGCTGGCCTGGTATCAGCAGAAGCCCGGAAAGGCCCCCAACC |
| | | TGTTGATCTACGCCGCCTCAAACCTCCAATCCGGGGTGCCGAGCCGCTTC |
| | | AGCGGCTCCGGTTCGGGTGCCGATTTCACTCTGACCATCTCCTCCCTGCA |
| | | ACCTGAAGATGTGGCTACCTACTACTGCCAAAAGTACAACTCCGCACCTT |
| | | TTACTTTCGGACCGGGGACCAAAGTGGACATTAAG |
| 149367-aa | 476 | QVQLQESGPGLVKPSQTLSLTCTVSGGSISSGGYYWSWIRQHPGKGLEWI |
| VH | | GYIYYSGSTYYNPSLKSRVTISVDTSKNQFSLKLSSVTAADTAVYYCARA |
| | | GIAARLRGAFDIWGQGTMVTVSS |
| 149367-aa | 497 | DIVMTQSPSSVSASVGDRVIITCRASQGIRNWLAWYQQKPGKAPNLLIYA |
| VL | | ASNLQSGVPSRFSGSGSGADFTLTISSLQPEDVATYYCQKYNSAPFTFGP |
| | | GTKVDIK |

149368

| | | |
|---|---|---|
| 149368-aa | 435 | QVQLVQSGAEVKKPGSSVKVSCKASGGTFSSYAISWVRQAPGQGLEWMGG |
| ScFv domain | | IIPIFGTANYAQKFQGRVTITADESTSTAYMELSSLRSEDTAVYYCARRG |
| | | GYQLLRWDVGLLRSAFDIWGQGTMVTVSSGGGGSGGGGSGGGGSSYVLTQ |
| | | PPSVSVAPGQTARITCGGNNIGSKSVHWYQQKPGQAPVLVLYGKNNRPSG |
| | | VPDRFSGSRSGTTASLTITGAQAEDEADYYCSSRDSSGDHLRVFGTGTKV |
| | | TVL |
| 149368-nt | 456 | CAAGTGCAGCTGGTCCAGTCGGGCGCCGAGGTCAAGAAGCCCGGGAGCTC |
| ScFv domain | | TGTGAAAGTGTCCTGCAAGGCCTCCGGGGGCACCTTTAGCTCCTACGCCA |
| | | TCTCCTGGGTCCGCCAAGCACCGGGTCAAGGCCTGGAGTGGATGGGGGGA |
| | | ATTATCCCTATCTTCGGCACTGCCAACTACGCCCAGAAGTTCCAGGGACG |
| | | CGTGACCATTACCGCGGACGAATCCACCTCCACCGCTTATATGGAGCTGT |
| | | CCAGCTTGCGCTCGGAAGATACCGCCGTGTACTACTGCGCCCGGAGGGGT |
| | | GGATACCAGCTGCTGAGATGGGACGTGGGCCTCCTGCGGTCGGCGTTCGA |
| | | CATCTGGGGCCAGGGCACTATGGTCACTGTGTCCAGCGGAGGAGGCGGAT |
| | | CGGGAGGCGGCGGATCAGGGGGAGGCGGTTCCAGCTACGTGCTTACTCAA |
| | | CCCCCTTCGGTGTCCGTGGCCCCGGGACAGACCGCCAGAATCACTTGCGG |
| | | AGGAAACAACATTGGGTCCAAGAGCGTGCATTGGTACCAGCAGAAGCCAG |
| | | GACAGGCCCCTGTGCTGGTGCTCTACGGGAAGAACAATCGGCCCAGCGGA |
| | | GTGCCGGACAGGTTCTCGGGTTCACGCTCCGGTACAACCGCTTCACTGAC |
| | | TATCACCGGGGCCCAGGCAGAGGATGAAGCGGACTACTACTGTTCCTCCC |
| | | GGGATTCATCCGGCGACCACCTCCGGGTGTTCGGAACCGGAACGAAGGTC |
| | | ACCGTGCTG |
| 149368-aa | 477 | QVQLVQSGAEVKKPGSSVKVSCKASGGTFSSYAISWVRQAPGQGLEWMGG |
| VH | | IIPIFGTANYAQKFQGRVTITADESTSTAYMELSSLRSEDTAVYYCARRG |
| | | GYQLLRWDVGLLRSAFDIWGQGTMVTVSS |
| 149368-aa | 498 | SYVLTQPPSVSVAPGQTARITCGGNNIGSKSVHWYQQKPGQAPVLVLYGK |
| VL | | NNRPSGVPDRFSGSRSGTTASLTITGAQAEDEADYYCSSRDSSGDHLRVF |
| | | GTGTKVTVL |

149369

| | | |
|---|---|---|
| 149369-aa | 436 | EVQLQQSGPGLVKPSQTLSLTCAISGDSVSSNSAAWNWIRQSPSRGLEWL |
| ScFv domain | | GRTYYRSKWYSFYAISLKSRIIINPDTSKNQFSLQLKSVTPEDTAVYYCA |
| | | RSSPEGLFLYWFDPWGQGTLVTVSSGGDGSGGGGSGGGGSSSELTQDPAV |
| | | SVALGQTIRITCQGDSLGNYYATWYQQKPGQAPVLVIYGTNNRPSGIPDR |
| | | FSASSSGNTASLTITGAQAEDEADYYCNSRDSSGHHLLFGTGTKVTVL |
| 149369-nt | 457 | GAAGTGCAGCTCCAACAGTCAGGACCGGGGCTCGTGAAGCCATCCCAGAC |
| ScFv domain | | CCTGTCCCTGACTTGTGCCATCTCGGGAGATAGCGTGTCATCGAACTCCG |
| | | CCGCCTGGAACTGGATTCGGCAGAGCCCGTCCCGCGGACTGGAGTGGCTT |
| | | GGAAGGACCTACTACCGGTCCAAGTGGTACTCTTTCTACGCGATCTCGCT |
| | | GAAGTCCCGCATTATCATTAACCCTGATACCTCCAAGAATCAGTTCTCCC |
| | | TCCAACTGAAATCCGTCACCCCCGAGGACACAGCAGTGTATTACTGCGCA |
| | | CGGAGCAGCCCCGAAGGACTGTTCCTGTATTGGTTTGACCCCTGGGGCCA |
| | | GGGGACTCTTGTGACCGTGTCGAGCGGCGGAGATGGGTCCGGTGGCGGTG |
| | | GTTCGGGGGGCGGCGGATCATCATCCGAACTGACCCAGGACCCGGCTGTG |
| | | TCCGTGGCGCTGGGACAAACCATCCGCATTACGTGCCAGGGAGACTCCCT |
| | | GGGCAACTACTACGCCACTTGGTACCAGCAGAAGCCGGGCCAAGCCCCTG |
| | | TGTTGGTCATCTACGGGACCAACAACAGACCTTCCGGCATCCCCGACCGG |
| | | TTCAGCGCTTCGTCCTCCGGCAACACTGCCAGCCTGACCATCACTGGAGC |
| | | GCAGGCCGAAGATGAGGCCGACTACTACTGCAACAGCAGAGACTCCTCGG |
| | | GTCATCACCTCTTGTTCGGAACTGGAACCAAGGTCACCGTGCTG |
| 149369-aa | 478 | EVQLQQSGPGLVKPSQTLSLTCAISGDSVSSNSAAWNWIRQSPSRGLEWL |
| VH | | GRTYYRSKWYSFYAISLKSRIIINPDTSKNQFSLQLKSVTPEDTAVYYCA |
| | | RSSPEGLFLYWFDPWGQGTLVTVSS |
| 149369-aa | 499 | SSELTQDPAVSVALGQTIRITCQGDSLGNYYATWYQQKPGQAPVLVIYGT |
| VL | | NNRPSGIPDRFSASSSGNTASLTITGAQAEDEADYYCNSRDSSGHHLLFG |
| | | TGTKVTVL |

BCMA_EBB-C1978-A4

| | | |
|---|---|---|
| BCMA_EBB- | 437 | EVQLVESGGGLVQPGGSLRLSCAASGFTFSSYAMSWVRQAPGKGLEWVSA |
| C1978-A4- | | ISGSGGSTYYADSVKGRFTISRDNSKNTLYLQMNSLRAEDTAVYYCAKVE |
| aa | | GSGSLDYWGQGTLVTVSSGGGGSGGGGSGGGGSEIVMTQSPGTLSLSPGE |
| ScFv domain | | RATLSCRASQSVSSAYLAWYQQKPGQPPRLLISGASTRATGIPDRFGGSG |
| | | SGTDFTLTISRLEPEDFAVYYCQHYGSSFNGSSLFTFGQGTRLEIK |
| BCMA_EBB- | 458 | GAAGTGCAGCTCGTGGAGTCAGGAGGCGGCCTGGTCCAGCCGGGAGGGTC |
| C1978-A4-nt | | CCTTAGACTGTCATGCGCCGCAAGCGGATTCACTTTCTCCTCCTATGCCA |
| ScFv domain | | TGAGCTGGGTCCGCCAAGCCCCCGGAAAGGGACTGGAATGGGTGTCCGCC |
| | | ATCTCGGGGTCTGGAGGCTCAACTTACTACGCTGACTCCGTGAAGGGACG |
| | | GTTCACCATTAGCCGCGACAACTCCAAGAACACCCTCTACCTCCAAATGA |
| | | ACTCCCTGCGGGCCGAGGATACCGCCGTCTACTACTGCGCCAAAGTGGAA |
| | | GGTTCAGGATCGCTGGACTACTGGGGACAGGGTACTCTCGTGACCGTGTC |
| | | ATCGGGCGGAGGAGGTTCCGGCGGTGGCGGCTCCGGCGGCGGAGGGTCGG |
| | | AGATCGTGATGACCCAGAGCCCTGGTACTCTGAGCCTTTCGCCGGGAGAA |
| | | AGGGCCACCCTGTCCTGCCGCGCTTCCCAATCCGTGTCCTCCGCGTACTT |
| | | GGCGTGGTACCAGCAGAAGCCGGGACAGCCCCCTCGGCTGCTGATCAGCG |
| | | GGGCCAGCACCCGGGCAACCGGAATCCCAGACAGATTCGGGGGTTCCGGC |
| | | AGCGGCACAGATTTCACCCTGACTATTTCGAGGTTGGAGCCCGAGGACTT |
| | | TGCGGTGTATTACTGTCAGCACTACGGGTCGTCCTTTAATGGCTCCAGCC |
| | | TGTTCACGTTCGGACAGGGGACCCGCCTGGAAATCAAG |
| BCMA_EBB- | 479 | EVQLVESGGGLVQPGGSLRLSCAASGFTFSSYAMSWVRQAPGKGLEWVSA |
| C1978-A4- | | ISGSGGSTYYADSVKGRFTISRDNSKNTLYLQMNSLRAEDTAVYYCAKVE |
| aa VH | | GSGSLDYWGQGTLVTVSS |
| BCMA_EBB- | 500 | EIVMTQSPGTLSLSPGERATLSCRASQSVSSAYLAWYQQKPGQPPRLLIS |
| C1978-A4- | | GASTRATGIPDRFGGSGSGTDFTLTISRLEPEDFAVYYCQHYGSSFNGSS |
| aa VL | | LFTFGQGTRLEIK |

BCMA_EBB-C1978-G1

| | | |
|---|---|---|
| BCMA_EBB- | 438 | EVQLVETGGGLVQPGGSLRLSCAASGITFSRYPMSWVRQAPGKGLEWVSG |
| C1978-G1- | | ISDSGVSTYYADSAKGRFTISRDNSKNTLFLQMSSLRDEDTAVYYCVTRA |
| aa | | GSEASDIWGQGTMVTVSSGGGGSGGGGSGGGGSEIVLTQSPATLSLSPGE |
| ScFv domain | | RATLSCRASQSVSNSLAWYQQKPGQAPRLLIYDASSRATGIPDRFSGSGS |
| | | GTDFTLTISRLEPEDFAIYYCQQFGTSSGLTFGGGTKLEIK |
| BCMA_EBB- | 459 | GAAGTGCAACTGGTGGAAACCGGTGGCGGCCTGGTGCAGCCTGGAGGATC |
| C1978-G1- | | ATTGAGGCTGTCATGCGCGGCCAGCGGTATTACCTTCTCCCGGTACCCCA |
| nt | | TGTCCTGGGTCAGACAGGCCCCGGGGAAAGGGCTTGAATGGGTGTCCGGG |
| ScFv domain | | ATCTCGGACTCCGGTGTCAGCACTTACTACGCCGACTCCGCCAAGGGACG |
| | | CTTCACCATTTCCCGGGACAACTCGAAGAACACCCTGTTCCTCCAAATGA |
| | | GCTCCCTCCGGGACGAGGATACTGCAGTGTACTACTGCGTGACCCGCGCC |
| | | GGGTCCGAGGCGTCTGACATTTGGGGACAGGGCACTATGGTCACCGTGTC |
| | | GTCCGGCGGAGGGGGCTCGGGAGGCGGTGGCAGCGGAGGAGGAGGGTCCG |
| | | AGATCGTGCTGACCCAATCCCCGGCCACCCTCTCGCTGAGCCCTGGAGAA |
| | | AGGGCAACCTTGTCCTGTCGCGCGAGCCAGTCCGTGAGCAACTCCCTGGC |
| | | CTGGTACCAGCAGAAGCCCGGACAGGCTCCGAGACTTCTGATCTACGACG |
| | | CTTCGAGCCGGGCCACTGGAATCCCCGACCGCTTTTCGGGGTCCGGCTCA |
| | | GGAACCGATTTCACCCTGACAATCTCACGGCTGGAGCCAGAGGATTTCGC |
| | | CATCTATTACTGCCAGCAGTTCGGTACTTCCTCCGGCCTGACTTTCGGAG |
| | | GCGGCACGAAGCTCGAAATCAAG |
| BCMA_EBB- | 480 | EVQLVETGGGLVQPGGSLRLSCAASGITFSRYPMSWVRQAPGKGLEWVSG |
| C1978-G1- | | ISDSGVSTYYADSAKGRFTISRDNSKNTLFLQMSSLRDEDTAVYYCVTRA |
| aa VH | | GSEASDIWGQGTMVTVSS |
| BCMA_EBB- | 501 | EIVLTQSPATLSLSPGERATLSCRASQSVSNSLAWYQQKPGQAPRLLIYD |
| C1978-G1- | | ASSRATGIPDRFSGSGSGTDFTLTISRLEPEDFAIYYCQQFGTSSGLTFG |
| aa VL | | GGTKLEIK |

BCMA_EBB-C1979-C1

| | | |
|---|---|---|
| BCMA_EBB- | 439 | QVQLVESGGGLVQPGGSLRLSCAASGFTFSSYAMSWVRQAPGKGLEWVSA |
| C1979-C1- | | ISGSGGSTYYADSVKGRFTISRDNAKNSLYLQMNSLRAEDTAIYYCARAT |
| aa | | YKRELRYYYGMDVWGQGTMVTVSSGGGGSGGGGSGGGGSEIVMTQSPGTV |
| ScFv domain | | SLSPGERATLSCRASQSVSSSFLAWYQQKPGQAPRLLIYGASSRATGIPD |
| | | RFSGSGSGTDFTLTISRLEPEDSAVYYCQQYHSSPSWTFGQGTRLEIK |
| BCMA_EBB- | 460 | CAAGTGCAGCTCGTGGAATCGGGTGGCGGACTGGTGCAGCCGGGGGGCTC |
| C1979-C1-nt | | ACTTAGACTGTCCTGCGCGGCCAGCGGATTCACTTTCTCCTCCTACGCCA |
| ScFv domain | | TGTCCTGGGTCAGACAGGCCCCTGGAAAGGGCCTGGAATGGGTGTCCGCA |
| | | ATCAGCGGCAGCGGCGGCTCGACCTATTACGCGGATTCAGTGAAGGGCAG |
| | | ATTCACCATTTCCCGGGACAACGCCAAGAACTCCTTGTACCTTCAAATGA |
| | | ACTCCCTCCGCGCGGAAGATACCGCAATCTACTACTGCGCTCGGGCCACT |
| | | TACAAGAGGGAACTGCGCTACTACTACGGGATGGACGTCTGGGGCCAGGG |
| | | AACCATGGTCACCGTGTCCAGCGGAGGAGGAGGATCGGGAGGAGGCGGTA |
| | | GCGGGGGTGGAGGGTCGGAGATCGTGATGACCCAGTCCCCCGGCACTGTG |
| | | TCGCTGTCCCCCGGCGAACGGGCCACCCTGTCATGTCGGGCCAGCCAGTC |
| | | AGTGTCGTCAAGCTTCCTCGCCTGGTACCAGCAGAAACCGGGACAAGCTC |
| | | CCCGCCTGCTGATCTACGGAGCCAGCAGCCGGGCCACCGGTATTCCTGAC |
| | | CGGTTCTCCGGTTCGGGGTCCGGGACCGACTTTACTCTGACTATCTCTCG |
| | | CCTCGAGCCAGAGGACTCCGCCGTGTATTACTGCCAGCAGTACCACTCCT |
| | | CCCCGTCCTGGACGTTCGGACAGGGCACAAGGCTGGAGATTAAG |
| BCMA_EBB- | 481 | QVQLVESGGGLVQPGGSLRLSCAASGFTFSSYAMSWVRQAPGKGLEWVSA |
| C1979-C1- | | ISGSGGSTYYADSVKGRFTISRDNAKNSLYLQMNSLRAEDTAIYYCARAT |
| aa VH | | YKRELRYYYGMDVWGQGTMVTVSS |
| BCMA_EBB- | 502 | EIVMTQSPGTVSLSPGERATLSCRASQSVSSSFLAWYQQKPGQAPRLLIY |
| C1979-C1- | | GASSRATGIPDRFSGSGSGTDFTLTISRLEPEDSAVYYCQQYHSSPSWTF |
| aa VL | | GQGTRLEIK |

BCMA_EBB-C1978-C7

| | | |
|---|---|---|
| BCMA_EBB- | 440 | EVQLVETGGGLVQPGGSLRLSCAASGFTFSSYAMSWVRQAPGKGLEWVSA |
| C1978-C7- | | ISGSGGSTYYADSVKGRFTISRDNSKNTLYLQMNTLKAEDTAVYYCARAT |
| aa | | YKRELRYYYGMDVWGQGTTVTVSSGGGGSGGGGSGGGGSEIVLTQSPSTL |
| ScFv domain | | SLSPGESATLSCRASQSVSTTFLAWYQQKPGQAPRLLIYGSSNRATGIPD |
| | | RFSGSGSGTDFTLTIRRLEPEDFAVYYCQQYHSSPSWTFGQGTKVEIK |
| BCMA_EBB- | 461 | GAGGTGCAGCTTGTGGAAACCGGTGGCGGACTGGTGCAGCCCGGAGGAAG |
| C1978-C7-nt | | CCTCAGGCTGTCCTGCGCCGCGTCCGGCTTCACCTTCTCCTCGTACGCCA |
| ScFv domain | | TGTCCTGGGTCCGCCAGGCCCCCGGAAAGGGCCTGGAATGGGTGTCCGCC |
| | | ATCTCTGGAAGCGGAGGTTCCACGTACTACGCGGACAGCGTCAAGGGAAG |
| | | GTTCACAATCTCCCGCGATAATTCGAAGAACACTCTGTACCTTCAAATGA |
| | | ACACCCTGAAGGCCGAGGACACTGCTGTGTACTACTGCGCACGGGCCACC |
| | | TACAAGAGAGAGCTCCGGTACTACTACGGAATGGACGTCTGGGGCCAGGG |
| | | AACTACTGTGACCGTGTCCTCGGGAGGGGGTGGCTCCGGGGGGGGCGGCT |
| | | CCGGCGGAGGCGGTTCCGAGATTGTGCTGACCCAGTCACCTTCAACTCTG |
| | | TCGCTGTCCCCGGGAGAGAGCGCTACTCTGAGCTGCCGGGCCAGCCAGTC |
| | | CGTGTCCACCACCTTCCTCGCCTGGTATCAGCAGAAGCCGGGGCAGGCAC |
| | | CACGGCTCTTGATCTACGGGTCAAGCAACAGAGCGACCGGAATTCCTGAC |
| | | CGCTTCTCGGGGAGCGGTTCAGGCACCGACTTCACCCTGACTATCCGGCG |
| | | CCTGGAACCCGAAGATTTCGCCGTGTATTACTGTCAACAGTACCACTCCT |
| | | CGCCGTCCTGGACCTTTGGCCAAGGAACCAAAGTGGAAATCAAG |
| BCMA_EBB- | 482 | EVQLVETGGGLVQPGGSLRLSCAASGFTFSSYAMSWVRQAPGKGLEWVSA |
| C1978-C7- | | ISGSGGSTYYADSVKGRFTISRDNSKNTLYLQMNTLKAEDTAVYYCARAT |
| aa VH | | YKRELRYYYGMDVWGQGTTVTVSS |
| BCMA_EBB- | 503 | EIVLTQSPSTLSLSPGESATLSCRASQSVSTTFLAWYQQKPGQAPRLLIY |
| C1978-C7- | | GSSNRATGIPDRFSGSGSGTDFTLTIRRLEPEDFAVYYCQQYHSSPSWTF |
| aa VL | | GQGTKVEIK |

BCMA_EBB-C1978-D10

| | | |
|---|---|---|
| BCMA_EBB- | 441 | EVQLVETGGGLVQPGRSLRLSCAASGFTFDDYAMHWVRQAPGKGLEWVSG |
| C1978-D10- | | ISWNSGSIGYADSVKGRFTISRDNAKNSLYLQMNSLRDEDTAVYYCARVG |
| aa | | KAVPDVWGQGTTVTVSSGGGGSGGGGSGGGGSDIVMTQTPSSLSASVGDR |
| ScFv domain | | VTITCRASQSISSYLNWYQQKPGKAPKLLIYAASSLQSGVPSRFSGSGSG |
| | | TDFTLTISSLQPEDFATYYCQQSYSTPYSFGQGTRLEIK |
| BCMA_EBB- | 462 | GAAGTGCAGCTCGTGGAAACTGGAGGTGGACTCGTGCAGCCTGGACGGTC |
| C1978-D10- | | GCTGCGGCTGAGCTGCGCTGCATCCGGCTTCACCTTCGACGATTATGCCA |
| nt | | TGCACTGGGTCAGACAGGCGCCAGGGAAGGGACTTGAGTGGGTGTCCGGT |
| ScFv domain | | ATCAGCTGGAATAGCGGCTCAATCGGATACGCGGACTCCGTGAAGGGAAG |
| | | GTTCACCATTTCCCGCGACAACGCCAAGAACTCCCTGTACTTGCAAATGA |
| | | ACAGCCTCCGGGATGAGGACACTGCCGTGTACTACTGCGCCCGCGTCGGA |
| | | AAAGCTGTGCCCGACGTCTGGGGCCAGGGAACCACTGTGACCGTGTCCAG |
| | | CGGCGGGGGTGGATCGGGCGGTGGAGGGTCCGGTGGAGGGGGCTCAGATA |
| | | TTGTGATGACCCAGACCCCCTCGTCCCTGTCCGCCTCGGTCGGCGACCGC |
| | | GTGACTATCACATGTAGAGCCTCGCAGAGCATCTCCAGCTACCTGAACTG |
| | | GTATCAGCAGAAGCCGGGGAAGGCCCCGAAGCTCCTGATCTACGCGGCAT |
| | | CATCACTGCAATCGGGAGTGCCGAGCCGGTTTTCCGGGTCCGGCTCCGGC |
| | | ACCGACTTCACGCTGACCATTTCTTCCCTGCAACCCGAGGACTTCGCCAC |
| | | TTACTACTGCCAGCAGTCCTACTCCACCCCTTACTCCTTCGGCCAAGGAA |
| | | CCAGGCTGGAAATCAAG |
| BCMA_EBB- | 483 | EVQLVETGGGLVQPGRSLRLSCAASGFTFDDYAMHWVRQAPGKGLEWVSG |
| C1978-D10- | | ISWNSGSIGYADSVKGRFTISRDNAKNSLYLQMNSLRDEDTAVYYCARVG |
| aa VH | | KAVPDVWGQGTTVTVSS |
| BCMA_EBB- | 504 | DIVMTQTPSSLSASVGDRVTITCRASQSISSYLNWYQQKPGKAPKLLIYA |
| C1978-D10- | | ASSLQSGVPSRFSGSGSGTDFTLTISSLQPEDFATYYCQQSYSTPYSFGQ |
| aa VL | | GTRLEIK |

BCMA_EBB-C1979-C12

| | | |
|---|---|---|
| BCMA_EBB- | 442 | EVQLVESGGGLVQPGRSLRLSCTASGFTFDDYAMHWVRQRPGKGLEWVAS |
| C1979-C12- | | INWKGNSLAYGDSVKGRFAISRDNAKNTVFLQMNSLRTEDTAVYYCASHQ |
| aa | | GVAYYNYAMDVWGRGTLVTVSSGGGGSGGGGSGGGGSEIVLTQSPGTLSL |
| ScFv domain | | SPGERATLSCRATQSIGSSFLAWYQQRPGQAPRLLIYGASQRATGIPDRF |
| | | SGRGSGTDFTLTISRVEPEDSAVYYCQHYESSPSWTFGQGTKVEIK |
| BCMA_EBB- | 463 | GAAGTGCAGCTCGTGGAGAGCGGGGGAGGATTGGTGCAGCCCGGAAGGTC |
| C1979-C12- | | CCTGCGGCTCTCCTGCACTGCGTCTGGCTTCACCTTCGACGACTACGCGA |
| nt | | TGCACTGGGTCAGACAGCGCCCGGGAAAGGGCCTGGAATGGGTCGCCTCA |
| ScFv domain | | ATCAACTGGAAGGGAAACTCCCTGGCCTATGGCGACAGCGTGAAGGGCCG |
| | | CTTCGCCATTTCGCGCGACAACGCCAAGAACACCGTGTTTCTGCAAATGA |
| | | ATTCCCTGCGGACCGAGGATACCGCTGTGTACTACTGCGCCAGCCACCAG |
| | | GGCGTGGCATACTATAACTACGCCATGGACGTGTGGGGAAGAGGGACGCT |
| | | CGTCACCGTGTCCTCCGGGGGCGGTGGATCGGGTGGAGGAGGAAGCGGTG |
| | | GCGGGGGCAGCGAAATCGTGCTGACTCAGAGCCCGGGAACTCTTTCACTG |
| | | TCCCCGGGAGAACGGGCCACTCTCTCGTGCCGGGCCACCCAGTCCATCGG |
| | | CTCCTCCTTCCTTGCCTGGTACCAGCAGAGGCCAGGACAGGCGCCCCGCC |
| | | TGCTGATCTACGGTGCTTCCCAACGCGCCACTGGCATTCCTGACCGGTTC |
| | | AGCGGCAGAGGGTCGGGAACCGATTTCACACTGACCATTTCCCGGGTGGA |
| | | GCCCGAAGATTCGGCAGTCTACTACTGTCAGCATTACGAGTCCTCCCCTT |
| | | CATGGACCTTCGGTCAAGGGACCAAAGTGGAGATCAAG |
| BCMA_EBB- | 484 | EVQLVESGGGLVQPGRSLRLSCTASGFTFDDYAMHWVRQRPGKGLEWVAS |
| C1979-C12- | | INWKGNSLAYGDSVKGRFAISRDNAKNTVFLQMNSLRTEDTAVYYCASHQ |
| aa VH | | GVAYYNYAMDVWGRGTLVTVSS |
| BCMA_EBB- | 505 | EIVLTQSPGTLSLSPGERATLSCRATQSIGSSFLAWYQQRPGQAPRLLIY |
| C1979-C12- | | GASQRATGIPDRFSGRGSGTDFTLTISRVEPEDSAVYYCQHYESSPSWTF |
| aa VL | | GQGTKVEIK |

BCMA_EBB-C1980-G4

| | | |
|---|---|---|
| BCMA_EBB- | 443 | EVQLVESGGGLVQPGGSLRLSCAASGFTFSSYAMSWVRQAPGKGLEWVSA |
| C1980-G4-aa | | ISGSGGSTYYADSVKGRFTISRDNSKNTLYLQMNSLRAEDTAVYYCAKVV |
| ScFv domain | | RDGMDVWGQGTTVTVSSGGGGSGGGGSGGGGSEIVLTQSPATLSLSPGER |
| | | ATLSCRASQSVSSSYLAWYQQKPGQAPRLLIYGASSRATGIPDRFSGNGS |
| | | GTDFTLTISRLEPEDFAVYYCQQYGSPPRFTFGPGTKVDIK |
| BCMA_EBB- | 464 | GAGGTGCAGTTGGTCGAAAGCGGGGGCGGGCTTGTGCAGCCTGGCGGATC |
| C1980-G4-nt | | ACTGCGGCTGTCCTGCGCGGCATCAGGCTTCACGTTTTCTTCCTACGCCA |
| ScFv domain | | TGTCCTGGGTGCGCCAGGCCCCTGGAAAGGGACTGGAATGGGTGTCCGCG |
| | | ATTTCGGGGTCCGGCGGGAGCACCTACTACGCCGATTCCGTGAAGGGCCG |
| | | CTTCACTATCTCGCGGGACAACTCCAAGAACACCCTCTACCTCCAAATGA |
| | | ATAGCCTGCGGGCCGAGGATACCGCCGTCTACTATTGCGCTAAGGTCGTG |
| | | CGCGACGGAATGGACGTGTGGGGACAGGGTACCACCGTGACAGTGTCCTC |
| | | GGGGGGAGGCGGTAGCGGCGGAGGAGGAAGCGGTGGTGGAGGTTCCGAGA |
| | | TTGTGCTGACTCAATCACCCGCGACCCTGAGCCTGTCCCCCGGCGAAAGG |
| | | GCCACTCTGTCCTGTCGGGCCAGCCAATCAGTCTCCTCCTCGTACCTGGC |
| | | CTGGTACCAGCAGAAGCCAGGACAGGCTCCGAGACTCCTTATCTATGGCG |
| | | CATCCTCCCGCGCCACCGGAATCCCGGATAGGTTCTCGGGAAACGGATCG |
| | | GGGACCGACTTCACTCTCACCATCTCCCGGCTGGAACCGGAGGACTTCGC |
| | | CGTGTACTACTGCCAGCAGTACGGCAGCCCGCCTAGATTCACTTTCGGCC |
| | | CCGGCACCAAAGTGGACATCAAG |
| BCMA_EBB- | 485 | EVQLVESGGGLVQPGGSLRLSCAASGFTFSSYAMSWVRQAPGKGLEWVSA |
| C1980-G4-aa | | ISGSGGSTYYADSVKGRFTISRDNSKNTLYLQMNSLRAEDTAVYYCAKVV |
| VH | | RDGMDVWGQGTTVTVSS |
| BCMA_EBB- | 506 | EIVLTQSPATLSLSPGERATLSCRASQSVSSSYLAWYQQKPGQAPRLLIY |
| C1980-G4-aa | | GASSRATGIPDRFSGNGSGTDFTLTISRLEPEDFAVYYCQQYGSPPRFTF |
| VL | | GPGTKVDIK |

BCMA_EBB-C1980-D2

| | | |
|---|---|---|
| BCMA_EBB- | 444 | EVQLLESGGGLVQPGGSLRLSCAASGFTFSSYAMSWVRQAPGKGLEWVSA |
| C1980-D2-aa | | ISGSGGSTYYADSVKGRFTISRDNSKNTLYLQMNSLRAEDTAVYYCAKIP |
| ScFv domain | | QTGTFDYWGQGTLVTVSSGGGGSGGGGSGGGGSEIVLTQSPGTLSLSPGE |
| | | RATLSCRASQSVSSSYLAWYQQRPGQAPRLLIYGASSRATGIPDRFSGSG |
| | | SGTDFTLTISRLEPEDFAVYYCQHYGSSPSWTFGQGTRLEIK |
| BCMA_EBB- | 465 | GAAGTGCAGCTGCTGGAGTCCGGCGGTGGATTGGTGCAACCGGGGGGATC |
| C1980-D2-nt | | GCTCAGACTGTCCTGTGCGGCGTCAGGCTTCACCTTCTCGAGCTACGCCA |
| ScFv domain | | TGTCATGGGTCAGACAGGCCCCTGGAAAGGGTCTGGAATGGGTGTCCGCC |
| | | ATTTCCGGGAGCGGGGGATCTACATACTACGCCGATAGCGTGAAGGGCCG |
| | | CTTCACCATTTCCCGGGACAACTCCAAGAACACTCTCTATCTGCAAATGA |
| | | ACTCCCTCCGCGCTGAGGACACTGCCGTGTACTACTGCGCCAAAATCCCT |
| | | CAGACCGGCACCTTCGACTACTGGGGACAGGGGACTCTGGTCACCGTCAG |
| | | CAGCGGTGGCGGAGGTTCGGGGGGAGGAGGAAGCGGCGGCGGAGGGTCCG |
| | | AGATTGTGCTGACCCAGTCACCCGGCACTTTGTCCCTGTCGCCTGGAGAA |
| | | AGGGCCACCCTTTCCTGCCGGGCATCCCAATCCGTGTCCTCCTCGTACCT |
| | | GGCCTGGTACCAGCAGAGGCCCGGACAGGCCCCACGGCTTCTGATCTACG |
| | | GAGCAAGCAGCCGCGCGACCGGTATCCCGGACCGGTTTTCGGGCTCGGGC |
| | | TCAGGAACTGACTTCACCCTCACCATCTCCCGCCTGGAACCCGAAGATTT |
| | | CGCTGTGTATTACTGCCAGCACTACGGCAGCTCCCCGTCCTGGACGTTCG |
| | | GCCAGGGAACTCGGCTGGAGATCAAG |
| BCMA_EBB- | 486 | EVQLLESGGGLVQPGGSLRLSCAASGFTFSSYAMSWVRQAPGKGLEWVSA |
| C1980-D2-aa | | ISGSGGSTYYADSVKGRFTISRDNSKNTLYLQMNSLRAEDTAVYYCAKIP |
| VH | | QTGTFDYWGQGTLVTVSS |
| BCMA_EBB- | 507 | EIVLTQSPGTLSLSPGERATLSCRASQSVSSSYLAWYQQRPGQAPRLLIY |
| C1980-D2-aa | | GASSRATGIPDRFSGSGSGTDFTLTISRLEPEDFAVYYCQHYGSSPSWTF |
| VL | | GQGTRLEIK |

BCMA_EBB-C1978-A10

| | | |
|---|---|---|
| BCMA_EBB- | 445 | EVQLVETGGGLVQPGGSLRLSCAASGFTFSSYAMSWVRQAPGKGLEWVSA |
| C1978-A10- | | ISGSGGSTYYADSVKGRFTMSRENDKNSVFLQMNSLRVEDTGVYYCARAN |
| aa | | YKRELRYYYGMDVWGQGTMVTVSSGGGGSGGGGSGGGGSEIVMTQSPGTL |
| ScFv domain | | SLSPGESATLSCRASQRVASNYLAWYQHKPGQAPSLLISGASSRATGVPD |
| | | RFSGSGSGTDFTLAISRLEPEDSAVYYCQHYDSSPSWTFGQGTKVEIK |
| BCMA_EBB- | 466 | GAAGTGCAACTGGTGGAAACCGGTGGAGGACTCGTGCAGCCTGGCGGCAG |
| C1978-A10- | | CCTCCGGCTGAGCTGCGCCGCTTCGGGATTCACCTTTTCCTCCTACGCGA |
| nt | | TGTCTTGGGTCAGACAGGCCCCCGGAAAGGGGCTGGAATGGGTGTCAGCC |
| ScFv domain | | ATCTCCGGCTCCGGCGGATCAACGTACTACGCCGACTCCGTGAAAGGCCG |
| | | GTTCACCATGTCGCGCGAGAATGACAAGAACTCCGTGTTCCTGCAAATGA |
| | | ACTCCCTGAGGGTGGAGGACACCGGAGTGTACTATTGTGCGCGCGCCAAC |
| | | TACAAGAGAGAGCTGCGGTACTACTACGGAATGGACGTCTGGGGACAGGG |
| | | AACTATGGTGACCGTGTCATCCGGTGGAGGGGGAAGCGGCGGTGGAGGCA |
| | | GCGGGGGCGGGGGTTCAGAAATTGTCATGACCCAGTCCCCGGGAACTCTT |
| | | TCCCTCTCCCCCGGGGAATCCGCGACTTTGTCCTGCCGGGCCAGCCAGCG |
| | | CGTGGCCTCGAACTACCTCGCATGGTACCAGCATAAGCCAGGCCAAGCCC |
| | | CTTCCCTGCTGATTTCCGGGGCTAGCAGCCGCGCCACTGGCGTGCCGGAT |
| | | AGGTTCTCGGGAAGCGGCTCGGGTACCGATTTCACCCTGGCAATCTCGCG |
| | | GCTGGAACCGGAGGATTCGGCCGTGTACTACTGCCAGCACTATGACTCAT |
| | | CCCCCTCCTGGACATTCGGACAGGGCACCAAGGTCGAGATCAAG |
| BCMA_EBB- | 487 | EVQLVETGGGLVQPGGSLRLSCAASGFTFSSYAMSWVRQAPGKGLEWVSA |
| C1978-A10- | | ISGSGGSTYYADSVKGRFTMSRENDKNSVFLQMNSLRVEDTGVYYCARAN |
| aa VH | | YKRELRYYYGMDVWGQGTMVTVSS |
| BCMA_EBB- | 508 | EIVMTQSPGTLSLSPGESATLSCRASQRVASNYLAWYQHKPGQAPSLLIS |
| C1978-A10- | | GASSRATGVPDRFSGSGSGTDFTLAISRLEPEDSAVYYCQHYDSSPSWTF |
| aa VL | | GQGTKVEIK |

BCMA_EBB-C1978-D4

| | | |
|---|---|---|
| BCMA_EBB- | 446 | EVQLLETGGGLVQPGGSLRLSCAASGFSFSSYAMSWVRQAPGKGLEWVSA |
| C1978-D4-aa | | ISGSGGSTYYADSVKGRFTISRDNSKNTLYLQMNSLRAEDTAVYYCAKAL |
| ScFv domain | | VGATGAFDIWGQGTLVTVSSGGGGSGGGGSGGGGSEIVLTQSPGTLSLSP |
| | | GERATLSCRASQSLSSNFLAWYQQKPGQAPGLLIYGASNWATGTPDRFSG |
| | | SGSGTDFTLTITRLEPEDFAVYYCQYYGTSPMYTFGQGTKVEIK |
| BCMA_EBB- | 467 | GAAGTGCAGCTGCTCGAAACCGGTGGAGGGCTGGTGCAGCCAGGGGGCTC |
| C1978-D4-nt | | CCTGAGGCTTTCATGCGCCGCTAGCGGATTCTCCTTCTCCTCTTACGCCA |
| ScFv domain | | TGTCGTGGGTCCGCCAAGCCCCTGGAAAAGGCCTGGAATGGGTGTCCGCG |
| | | ATTTCCGGGAGCGGAGGTTCGACCTATTACGCCGACTCCGTGAAGGGCCG |
| | | CTTTACCATCTCCCGGGATAACTCCAAGAACACTCTGTACCTCCAAATGA |
| | | ACTCGCTGAGAGCCGAGGACACCGCCGTGTATTACTGCGCGAAGGCGCTG |
| | | GTCGGCGCGACTGGGGCATTCGACATCTGGGGACAGGGAACTCTTGTGAC |
| | | CGTGTCGAGCGGAGGCGGCGGCTCCGGCGGAGGAGGGAGCGGGGGCGGTG |
| | | GTTCCGAAATCGTGTTGACTCAGTCCCCGGGAACCCTGAGCTTGTCACCC |
| | | GGGGAGCGGGCCACTCTCTCCTGTCGCGCCTCCCAATCGCTCTCATCCAA |
| | | TTTCCTGGCCTGGTACCAGCAGAAGCCCGGACAGGCCCCGGGCCTGCTCA |
| | | TCTACGGCGCTTCAAACTGGGCAACGGGAACCCCTGATCGGTTCAGCGGA |
| | | AGCGGATCGGGTACTGACTTTACCCTGACCATCACCAGACTGGAACCGGA |
| | | GGACTTCGCCGTGTACTACTGCCAGTACTACGGCACCTCCCCCATGTACA |
| | | CATTCGGACAGGGTACCAAGGTCGAGATTAAG |
| BCMA_EBB- | 488 | EVQLLETGGGLVQPGGSLRLSCAASGFSFSSYAMSWVRQAPGKGLEWVSA |
| C1978-D4-aa | | ISGSGGSTYYADSVKGRFTISRDNSKNTLYLQMNSLRAEDTAVYYCAKAL |
| VH | | VGATGAFDIWGQGTLVTVSS |
| BCMA_EBB- | 509 | EIVLTQSPGTLSLSPGERATLSCRASQSLSSNFLAWYQQKPGQAPGLLIY |
| C1978-D4-aa | | GASNWATGTPDRFSGSGSGTDFTLTITRLEPEDFAVYYCQYYGTSPMYTF |
| VL | | GQGTKVEIK |

BCMA_EBB-C1980-A2

| | | |
|---|---|---|
| BCMA_EBB- | 447 | EVQLLESGGGLVQPGGSLRLSCAASGFTFSSYAMSWVRQAPGKGLEWVSA |
| C1980-A2-aa | | ISGSGGSTYYADSVKGRFTISRDNSKNTLYLQMNSLRAEDTAVYYCVLWF |
| ScFv domain | | GEGFDPWGQGTLVTVSSGGGGSGGGGSGGGGSDIVLTQSPLSLPVTPGEP |
| | | ASISCRSSQSLLHSNGYNYLDWYLQKPGQSPQLLIYLGSNRASGVPDRFS |
| | | GSGSGTDFTLKISRVEAEDVGVYYCMQALQTPLTFGGGTKVDIK |
| BCMA_EBB- | 468 | GAAGTGCAGCTGCTTGAGAGCGGTGGAGGTCTGGTGCAGCCCGGGGGATC |
| C1980-A2-nt | | ACTGCGCCTGTCCTGTGCCGCGTCCGGTTTCACTTTCTCCTCGTACGCCA |
| ScFv domain | | TGTCGTGGGTCAGACAGGCACCGGGAAAGGGACTGGAATGGGTGTCAGCC |
| | | ATTTCGGGTTCGGGGGGCAGCACCTACTACGCTGACTCCGTGAAGGGCCG |
| | | GTTCACCATTTCCCGCGACAACTCCAAGAACACCTTGTACCTCCAAATGA |
| | | ACTCCCTGCGGGCCGAAGATACCGCCGTGTATTACTGCGTGCTGTGGTTC |
| | | GGAGAGGGATTCGACCCGTGGGGACAAGGAACACTCGTGACTGTGTCATC |
| | | CGGCGGAGGCGGCAGCGGTGGCGGCGGTTCCGGCGGCGGCGGATCTGACA |
| | | TCGTGTTGACCCAGTCCCCTCTGAGCCTGCCGGTCACTCCTGGCGAACCA |
| | | GCCAGCATCTCCTGCCGGTCGAGCCAGTCCCTCCTGCACTCCAATGGGTA |
| | | CAACTACCTCGATTGGTATCTGCAAAAGCCGGGCCAGAGCCCCCAGCTGC |
| | | TGATCTACCTTGGGTCAAACCGCGCTTCCGGGGTGCCTGATAGATTCTCC |
| | | GGGTCCGGGAGCGGAACCGACTTTACCCTGAAAATCTCGAGGGTGGAGGC |
| | | CGAGGACGTCGGAGTGTACTACTGCATGCAGGCGCTCCAGACTCCCCTGA |
| | | CCTTCGGAGGAGGAACGAAGGTCGACATCAAGA |
| BCMA_EBB- | 489 | EVQLLESGGGLVQPGGSLRLSCAASGFTFSSYAMSWVRQAPGKGLEWVSA |
| C1980-A2-aa | | ISGSGGSTYYADSVKGRFTISRDNSKNTLYLQMNSLRAEDTAVYYCVLWF |
| VH | | GEGFDPWGQGTLVTVSS |
| BCMA_EBB- | 510 | DIVLTQSPLSLPVTPGEPASISCRSSQSLLHSNGYNYLDWYLQKPGQSPQ |
| C1980-A2-aa | | LLIYLGSNRASGVPDRFSGSGSGTDFTLKISRVEAEDVGVYYCMQALQTP |
| VL | | LTFGGGTKVDIK |

BCMA_EBB-C1981-C3

| | | |
|---|---|---|
| BCMA_EBB- | 448 | QVQLVESGGGLVQPGGSLRLSCAASGFTFSSYAMSWVRQAPGKGLEWVSA |
| C1981-C3-aa | | ISGSGGSTYYADSVKGRFTISRDNSKNTLYLQMNSLRAEDTAVYYCAKVG |
| ScFv domain | | YDSSGYYRDYYGMDVWGQGTTVTVSSGGGGSGGGGSGGGGSEIVLTQSPG |
| | | TLSLSPGERATLSCRASQSVSSSYLAWYQQKPGQAPRLLIYGTSSRATGI |
| | | SDRFSGSGSGTDFTLTISRLEPEDFAVYYCQHYGNSPPKFTFGPGTKLEI |
| | | K |
| BCMA_EBB- | 469 | CAAGTGCAGCTCGTGGAGTCAGGCGGAGGACTGGTGCAGCCCGGGGGCTC |
| C1981-C3-nt | | CCTGAGACTTTCCTGCGCGGCATCGGGTTTTACCTTCTCCTCCTATGCTA |
| ScFv domain | | TGTCCTGGGTGCGCCAGGCCCCGGGAAAGGGACTGGAATGGGTGTCCGCA |
| | | ATCAGCGGTAGCGGGGGCTCAACATACTACGCCGACTCCGTCAAGGGTCG |
| | | CTTCACTATTTCCCGGGACAACTCCAAGAATACCCTGTACCTCCAAATGA |
| | | ACAGCCTCAGGGCCGAGGATACTGCCGTGTACTACTGCGCCAAAGTCGGA |
| | | TACGATAGCTCCGGTTACTACCGGGACTACTACGGAATGGACGTGTGGGG |
| | | ACAGGGCACCACCGTGACCGTGTCAAGCGGCGGAGGCGGTTCAGGAGGGG |
| | | GAGGCTCCGGCGGTGGAGGGTCCGAAATCGTCCTGACTCAGTCGCCTGGC |
| | | ACTCTGTCGTTGTCCCCGGGGGAGCGCGCTACCCTGTCGTGTCGGGCGTC |
| | | GCAGTCCGTGTCGAGCTCCTACCTCGCGTGGTACCAGCAGAAGCCCGGAC |
| | | AGGCCCCTAGACTTCTGATCTACGGCACTTCTTCACGCGCCACCGGGATC |
| | | AGCGACAGGTTCAGCGGCTCCGGCTCCGGGACCGACTTCACCCTGACCAT |
| | | TAGCCGGCTGGAGCCTGAAGATTTCGCCGTGTATTACTGCCAACACTACG |
| | | GAAACTCGCCGCCAAAGTTCACGTTCGGACCCGGAACCAAGCTGGAAATC |
| | | AAG |
| BCMA_EBB- | 490 | QVQLVESGGGLVQPGGSLRLSCAASGFTFSSYAMSWVRQAPGKGLEWVSA |
| C1981-C3-aa | | ISGSGGSTYYADSVKGRFTISRDNSKNTLYLQMNSLRAEDTAVYYCAKVG |
| VH | | YDSSGYYRDYYGMDVWGQGTTVTVSS |
| BCMA_EBB- | 511 | EIVLTQSPGTLSLSPGERATLSCRASQSVSSSYLAWYQQKPGQAPRLLIY |
| C1981-C3-aa | | GTSSRATGISDRFSGSGSGTDFTLTISRLEPEDFAVYYCQHYGNSPPKFT |
| VL | | FGPGTKLEIK |

BCMA_EBB-C1978-G4

| | | |
|---|---|---|
| BCMA_EBB- | 449 | EVQLVESGGGLVQPGGSLRLSCAASGFTFSSYAMSWVRQAPGKGLEWVSA |
| C1978-G4-aa | | ISGSGGSTYYADSVKGRFTISRDNSKNTLYLQMNSLRAEDTAVYYCAKMG |
| ScFv domain | | WSSGYLGAFDIWGQGTTVTVSSGGGGSGGGGSGGGGSEIVLTQSPGTLSL |
| | | SPGERATLSCRASQSVASSFLAWYQQKPGQAPRLLIYGASGRATGIPDRF |
| | | SGSGSGTDFTLTISRLEPEDFAVYYCQHYGGSPRLTFGGGTKVDIK |
| BCMA_EBB- | 470 | GAAGTCCAACTGGTGGAGTCCGGGGGAGGGCTCGTGCAGCCCGGAGGCAG |
| C1978-G4-nt | | CCTTCGGCTGTCGTGCGCCGCCTCCGGGTTCACGTTCTCATCCTACGCGA |
| ScFv domain | | TGTCGTGGGTCAGACAGGCACCAGGAAAGGGACTGGAATGGGTGTCCGCC |
| | | ATTAGCGGCTCCGGCGGTAGCACCTACTATGCCGACTCAGTGAAGGGAAG |
| | | GTTCACTATCTCCCGCGACAACAGCAAGAACACCCTGTACCTCCAAATGA |
| | | ACTCTCTGCGGGCCGAGGATACCGCGGTGTACTATTGCGCCAAGATGGGT |
| | | TGGTCCAGCGGATACTTGGGAGCCTTCGACATTTGGGGACAGGGCACTAC |
| | | TGTGACCGTGTCCTCCGGGGGTGGCGGATCGGGAGGCGGCGGCTCGGGTG |
| | | GAGGGGGTTCCGAAATCGTGTTGACCCAGTCACCGGGAACCCTCTCGCTG |
| | | TCCCCGGGAGAACGGGCTACACTGTCATGTAGAGCGTCCCAGTCCGTGGC |
| | | TTCCTCGTTCCTGGCCTGGTACCAGCAGAAGCCGGGACAGGCACCCCGCC |
| | | TGCTCATCTACGGAGCCAGCGGCCGGGCGACCGGCATCCCTGACCGCTTC |
| | | TCCGGTTCCGGCTCGGGCACCGACTTTACTCTGACCATTAGCAGGCTTGA |
| | | GCCCGAGGATTTTGCCGTGTACTACTGCCAACACTACGGGGGGAGCCCTC |
| | | GCCTGACCTTCGGAGGCGGAACTAAGGTCGATATCAAAA |
| BCMA_EBB- | 491 | EVQLVESGGGLVQPGGSLRLSCAASGFTFSSYAMSWVRQAPGKGLEWVSA |
| C1978-G4-aa | | ISGSGGSTYYADSVKGRFTISRDNSKNTLYLQMNSLRAEDTAVYYCAKMG |
| VH | | WSSGYLGAFDIWGQGTTVTVSS |
| BCMA_EBB- | 512 | EIVLTQSPGTLSLSPGERATLSCRASQSVASSFLAWYQQKPGQAPRLLIY |
| C1978-G4-aa | | GASGRATGIPDRFSGSGSGTDFTLTISRLEPEDFAVYYCQHYGGSPRLTF |
| VL | | GGGTKVDIK |

[0357] In embodiments, additional exemplary BCMA CAR constructs are generated using the VH and VL sequences from PCT Publication WO2012/0163805 (the contents of which are hereby incorporated by reference in its entirety). In embodiments, additional exemplary BCMA CAR constructs are generated using the VH and VL sequences from PCT Publication WO2016/014565 (the contents of which are hereby incorporated by reference in its entirety). In embodiments, additional exemplary BCMA CAR constructs are generated using the VH and VL sequences from PCT Publication WO2014/122144 (the contents of which are hereby incorporated by reference in its entirety). In embodiments, additional exemplary BCMA CAR constructs are generated using the CAR molecules, and/or the VH and VL sequences from PCT Publication WO2016/014789 (the contents of which are hereby incorporated by reference in its entirety). In embodiments, additional exemplary BCMA CAR constructs are generated using the CAR molecules, and/or the VH and VL sequences from PCT Publication WO2014/089335 (the contents of which are hereby incorporated by reference in its entirety). In embodiments, additional exemplary BCMA CAR constructs are generated using the CAR molecules, and/or the VH and VL sequences from PCT Publication WO2014/140248 (the contents of which are hereby incorporated by reference in its entirety).

[0358] In embodiments, additional exemplary BCMA CAR constructs can also be generated using the VH and VL sequences found in Table 13. The amino acid sequences of exemplary scFv domains comprising the VH and VL domains and a linker sequence, and full-length CARs are also found in Table 13.

TABLE 13
Additional exemplary BCMA binding domain sequences

| | | SEQ |
|---|---|---|
| | | ID |
| Name | Sequence | NO: |
| A7D12.2 | QIQLVQSGPDLKKPGETVKLSCKASGYTFTNFGMNWVKQAPGKGFKWMAWINTYTGESYFA | 555 |
| VH | DDFKGRFAFSVETSATTAYLQINNLKTEDTATYFCARGEIYYGYDGGFAYWGQGTLVTVSA | |
| A7D12.2 | DVVMTQSHRFMSTSVGDRVSITCRASQDVNTAVSWYQQKPGQSPKLLIFSASYRYTGVPDR | 559 |
| VL | FTGSGSGADFTLTISSVQAEDLAVYYCQQHYSTPWTFGGGTKLDIK | |
| A7D12.2 | QIQLVQSGPDLKKPGETVKLSCKASGYTFTNFGMNWVKQAPGKGFKWMAWINTYTGESYFA | 563 |
| scFv | DDFKGRFAFSVETSATTAYLQINNLKTEDTATYFCARGEIYYGYDGGFAYWGQGTLVTVSA | |
| domain | GGGGSGGGGSGGGGSDVVMTQSHRFMSTSVGDRVSITCRASQDVNTAVSWYQQKPGQSPKL | |
| | LIFSASYRYTGVPDRFTGSGSGADFTLTISSVQAEDLAVYYCQQHYSTPWTFGGGTKLDIK | |
| C11D5.3 | QIQLVQSGPELKKPGETVKISCKASGYTFTDYSINWVKRAPGKGLKWMGWINTETREPAYA | 556 |
| VH | YDFRGRFAFSLETSASTAYLQINNLKYEDTATYFCALDYSYAMDYWGQGTSVTVSS | |
| C11D5.3 | DIVLTQSPASLAMSLGKRATISCRASESVSVIGAHLIHWYQQKPGQPPKLLIYLASNLETG | 560 |
| VL | VPARFSGSGSGTDFTLTIDPVEEDDVAIYSCLQSRIFPRTFGGGTKLEIK | |
| C11D5.3 | QIQLVQSGPELKKPGETVKISCKASGYTFTDYSINWVKRAPGKGLKWMGWINTETREPAYA | 564 |
| scFv | YDFRGRFAFSLETSASTAYLQINNLKYEDTATYFCALDYSYAMDYWGQGTSVTVSSGGGGS | |
| domain | GGGGSGGGGSQIQLVQSGPELKKPGETVKISCKASGYTFTDYSINWVKRAPGKGLKWMGWI | |
| | NTETREPAYAYDFRGRFAFSLETSASTAYLQINNLKYEDTATYFCALDYSYAMDYWGQGTS | |
| | VTVSS | |
| C12A3.2 | QIQLVQSGPELKKPGETVKISCKASGYTFRHYSMNWVKQAPGKGLKWMGRINTESGVPIYA | 557 |
| VH | DDFKGRFAFSVETSASTAYLVINNLKDEDTASYFCSNDYLYSLDFWGQGTALTVSS | |
| C12A3.2 | DIVLTQSPPSLAMSLGKRATISCRASESVTILGSHLIYWYQQKPGQPPTLLIQLASNVQTG | 561 |
| VL | VPARFSGSGSRTDFTLTIDPVEEDDVAVYYCLQSRTIPRTFGGGTKLEIK | |
| C12A3.2 | QIQLVQSGPELKKPGETVKISCKASGYTFRHYSMNWVKQAPGKGLKWMGRINTESGVPIYA | 565 |
| scFv | DDFKGRFAFSVETSASTAYLVINNLKDEDTASYFCSNDYLYSLDFWGQGTALTVSSGGGGS | |
| domain | GGGGSGGGGSDIVLTQSPPSLAMSLGKRATISCRASESVTILGSHLIYWYQQKPGQPPTLL | |
| | IQLASNVQTGVPARFSGSGSRTDFTLTIDPVEEDDVAVYYCLQSRTIPRTFGGGTKLEIK | |
| C13F12.1 | QIQLVQSGPELKKPGETVKISCKASGYTFTHYSMNWVKQAPGKGLKWMGRINTETGEPLYA | 558 |
| VH | DDFKGRFAFSLETSASTAYLVINNLKNEDTATFFCSNDYLYSCDYWGQGTTLTVSS | |
| C13F12.1 | DIVLTQSPPSLAMSLGKRATISCRASESVTILGSHLIYWYQQKPGQPPTLLIQLASNVQTG | 562 |
| VL | VPARFSGSGSRTDFTLTIDPVEEDDVAVYYCLQSRTIPRTFGGGTKLEIK | |
| C13F12.1 | QIQLVQSGPELKKPGETVKISCKASGYTFTHYSMNWVKQAPGKGLKWMGRINTETGEPLYA | 566 |
| scFv | DDFKGRFAFSLETSASTAYLVINNLKNEDTATFFCSNDYLYSCDYWGQGTTLTVSSGGGGS | |
| domain | GGGGSGGGGSDIVLTQSPPSLAMSLGKRATISCRASESVTILGSHLIYWYQQKPGQPPTLL | |
| | IQLASNVQTGVPARFSGSGSRTDFTLTIDPVEEDDVAVYYCLQSRTIPRTFGGGTKLEIK | |

[0359] The sequences of human CDR sequences of the scFv domains are shown in Table 14 for the heavy chain variable domains and in Table 15 for the light chain variable domains. “ID” stands for the respective SEQ ID NO for each CDR. The CDRs are shown according to the Kabat definition, however, the CDRs under other convention, for example, Chothia or the combined Kabat/Chothia definitions may be readily deduced based on the VH and VL sequences above.

TABLE 14
Heavy Chain Variable Domain CDRs according to the Kabat
numbering scheme (Kabat et al. (1991), “Sequences of
Proteins of Immunological Interest,” 5th Ed.
Public Health Service, National Institutes of Health,
Bethesda, MD)

| | | | | SEQ | | SEQ |
|---|---|---|---|---|---|---|
| | | SEQ ID | | ID | | ID |
| Candidate | HCDR1 | NO: | HCDR2 | NO: | HCDR3 | NO: |
| 139109 | NHGMS | 694 | GIVYSGSTYYAAS | 734 | HGGESDV | 774 |
| | | | VKG | | | |
| 139103 | NYAMS | 684 | GISRSGENTYYAD | 724 | SPAHYYGGMDV | 764 |
| | | | SVKG | | | |
| 139105 | DYAMH | 685 | GISWNSGSIGYAD | 725 | HSFLAY | 765 |
| | | | SVKG | | | |
| 139111 | NHGMS | 686 | GIVYSGSTYYAAS | 726 | HGGESDV | 766 |
| | | | VKG | | | |
| 139100 | NFGIN | 687 | WINPKNNNTNYA | 727 | GPYYYQSYMDV | 767 |
| | | | QKFQG | | | |
| 139101 | SDAMT | 688 | VISGSGGTTYYAD | 728 | LDSSGYYYARGPRY | 768 |
| | | | SVKG | | | |
| 139102 | NYGIT | 689 | WISAYNGNTNYA | 729 | GPYYYYMDV | 769 |
| | | | QKFQG | | | |
| 139104 | NHGMS | 690 | GIVYSGSTYYAAS | 730 | HGGESDV | 770 |
| | | | VKG | | | |
| 139106 | NHGMS | 691 | GIVYSGSTYYAAS | 731 | HGGESDV | 771 |
| | | | VKG | | | |
| 139107 | NHGMS | 692 | GIVYSGSTYYAAS | 732 | HGGESDV | 772 |
| | | | VKG | | | |
| 139108 | DYYMS | 693 | YISSSGSTIYYADS | 733 | ESGDGMDV | 773 |
| | | | VKG | | | |
| 139110 | DYYMS | 695 | YISSSGNTIYYADS | 735 | STMVREDY | 775 |
| | | | VKG | | | |
| 139112 | NHGMS | 696 | GIVYSGSTYYAAS | 736 | HGGESDV | 776 |
| | | | VKG | | | |
| 139113 | NHGMS | 697 | GIVYSGSTYYAAS | 737 | HGGESDV | 777 |
| | | | VKG | | | |
| 139114 | NHGMS | 698 | GIVYSGSTYYAAS | 738 | HGGESDV | 778 |
| | | | VKG | | | |
| 149362 | SSYYYWG | 699 | SIYYSGSAYYNPS | 739 | HWQEWPDAFDI | 779 |
| | | | LKS | | | |
| 149363 | TSGMCVS | 700 | RIDWDEDKFYSTS | 740 | SGAGGTSATAFDI | 780 |
| | | | LKT | | | |
| 149364 | SYSMN | 701 | SISSSSSYIYYADS | 741 | TIAAVYAFDI | 781 |
| | | | VKG | | | |
| 149365 | DYYMS | 702 | YISSSGSTIYYADS | 742 | DLRGAFDI | 782 |
| | | | VKG | | | |
| 149366 | SHYIH | 703 | MINPSGGVTAYSQ | 743 | EGSGSGWYFDF | 783 |
| | | | TLQG | | | |
| 149367 | SGGYYWS | 704 | YIYYSGSTYYNPS | 744 | AGIAARLRGAFDI | 784 |
| | | | LKS | | | |
| 149368 | SYAIS | 705 | GIIPIFGTANYAQK | 745 | RGGYQLLRWDVGLL | 785 |
| | | | FQG | | RSAFDI | |
| 149369 | SNSAAWN | 706 | RTYYRSKWYSFY | 746 | SSPEGLFLYWFDP | 786 |
| | | | AISLKS | | | |
| BCMA_EBB- | SYAMS | 707 | AISGSGGSTYYAD | 747 | VEGSGSLDY | 787 |
| C1978-A4 | | | SVKG | | | |
| BCMA_EBB- | RYPMS | 708 | GISDSGVSTYYAD | 748 | RAGSEASDI | 788 |
| C1978-G1 | | | SAKG | | | |
| BCMA_EBB- | SYAMS | 709 | AISGSGGSTYYAD | 749 | ATYKRELRYYYGM | 789 |
| C1979-C1 | | | SVKG | | DV | |
| BCMA_EBB- | SYAMS | 710 | AISGSGGSTYYAD | 750 | ATYKRELRYYYGM | 790 |
| C1978-C7 | | | SVKG | | DV | |
| BCMA_EBB- | DYAMH | 711 | GISWNSGSIGYAD | 751 | VGKAVPDV | 791 |
| C1978-D10 | | | SVKG | | | |
| BCMA_EBB- | DYAMH | 712 | SINWKGNSLAYG | 752 | HQGVAYYNYAMDV | 792 |
| C1979-C12 | | | DSVKG | | | |
| BCMA_EBB- | SYAMS | 713 | AISGSGGSTYYAD | 753 | VVRDGMDV | 793 |
| C1980-G4 | | | SVKG | | | |
| BCMA_EBB- | SYAMS | 714 | AISGSGGSTYYAD | 754 | IPQTGTFDY | 794 |
| C1980-D2 | | | SVKG | | | |
| BCMA_EBB- | SYAMS | 715 | AISGSGGSTYYAD | 755 | ANYKRELRYYYGM | 795 |
| C1978-A10 | | | SVKG | | DV | |
| BCMA_EBB- | SYAMS | 716 | AISGSGGSTYYAD | 756 | ALVGATGAFDI | 796 |
| C1978-D4 | | | SVKG | | | |
| BCMA_EBB- | SYAMS | 717 | AISGSGGSTYYAD | 757 | WFGEGFDP | 797 |
| C1980-A2 | | | SVKG | | | |
| BCMA_EBB- | SYAMS | 718 | AISGSGGSTYYAD | 758 | VGYDSSGYYRDYYG | 798 |
| C1981-C3 | | | SVKG | | MDV | |
| BCMA_EBB- | SYAMS | 719 | AISGSGGSTYYAD | 759 | MGWSSGYLGAFDI | 799 |
| C1978-G4 | | | SVKG | | | |
| A7D12.2 | NFGMN | 720 | WINTYTGESYFAD | 760 | GEIYYGYDGGFAY | 800 |
| | | | DFKG | | | |
| C11D5.3 | DYSIN | 721 | WINTETREPAYAY | 761 | DYSYAMDY | 801 |
| | | | DFRG | | | |
| C12A3.2 | HYSMN | 722 | RINTESGVPIYAD | 762 | DYLYSLDF | 802 |
| | | | DFKG | | | |
| C13F12.1 | HYSMN | 723 | RINTETGEPLYAD | 763 | DYLYSCDY | 803 |
| | | | DFKG | | | |

TABLE 15
Light Chain Variable Domain CDRs according to the Kabat
numbering scheme (Kabat et al. (1991), “Sequences of
Proteins of Immunological Interest,” 5th Ed.
Public Health Service, National Institutes of Health,
Bethesda, MD)

| | | | | SEQ | | SEQ |
|---|---|---|---|---|---|---|
| | | SEQ ID | | ID | | ID |
| Candidate | LCDR1 | NO: | LCDR2 | NO: | LCDR3 | NO: |
| 139109 | RASQSISSYLN | 814 | AASSLQS | 854 | QQSYSTPYT | 894 |
| 139103 | RASQSISSSFLA | 804 | GASRRAT | 844 | QQYHSSPSWT | 884 |
| 139105 | RSSQSLLHSNGYNYLD | 805 | LGSNRAS | 845 | MQALQTPYT | 885 |
| 139111 | KSSQSLLRNDGKTPLY | 806 | EVSNRFS | 846 | MQNIQFPS | 886 |
| 139100 | RSSQSLLHSNGYNYLN | 807 | LGSKRAS | 847 | MQALQTPYT | 887 |
| 139101 | RASQSISSYLN | 808 | GASTLAS | 848 | QQSYKRAS | 888 |
| 139102 | RSSQSLLYSNGYNYVD | 809 | LGSNRAS | 849 | MQGRQFPYS | 889 |
| 139104 | RASQSVSSNLA | 810 | GASTRAS | 850 | QQYGSSLT | 890 |
| 139106 | RASQSVSSKLA | 811 | GASIRAT | 851 | QQYGSSSWT | 891 |
| 139107 | RASQSVGSTNLA | 812 | DASNRAT | 852 | QQYGSSPPWT | 892 |
| 139108 | RASQSISSYLN | 813 | AASSLQS | 853 | QQSYTLA | 893 |
| 139110 | KSSESLVHNSGKTYLN | 815 | EVSNRDS | 855 | MQGTHWPGT | 895 |
| 139112 | QASEDINKFLN | 816 | DASTLQT | 856 | QQYESLPLT | 896 |
| 139113 | RASQSVGSNLA | 817 | GASTRAT | 857 | QQYNDWLPVT | 897 |
| 139114 | RASQSIGSSSLA | 818 | GASSRAS | 858 | QQYAGSPPFT | 898 |
| 149362 | KASQDIDDAMN | 819 | SATSPVP | 859 | LQHDNFPLT | 899 |
| 149363 | RASQDIYNNLA | 820 | AANKSQS | 860 | QHYYRFPYS | 900 |
| 149364 | RSSQSLLHSNGYNYLD | 821 | LGSNRAS | 861 | MQALQTPYT | 901 |
| 149365 | GGNNIGTKSVH | 822 | DDSVRPS | 862 | QVWDSDSEHVV | 902 |
| 149366 | SGDGLSKKYVS | 823 | RDKERPS | 863 | QAWDDTTVV | 903 |
| 149367 | RASQGIRNWLA | 824 | AASNLQS | 864 | QKYNSAPFT | 904 |
| 149368 | GGNNIGSKSVH | 825 | GKNNRPS | 865 | SSRDSSGDHLRV | 905 |
| 149369 | QGDSLGNYYAT | 826 | GTNNRPS | 866 | NSRDSSGHHLL | 906 |
| BCMA_EBB- | RASQSVSSAYLA | 827 | GASTRAT | 867 | QHYGSSFNGSS | 907 |
| C1978-A4 | | | | | LFT | |
| BCMA_EBB- | RASQSVSNSLA | 828 | DASSRAT | 868 | QQFGTSSGLT | 908 |
| C1978-G1 | | | | | | |
| BCMA_EBB- | RASQSVSSSFLA | 829 | GASSRAT | 869 | QQYHSSPSWT | 909 |
| C1979-C1 | | | | | | |
| BCMA_EBB- | RASQSVSTTFLA | 830 | GSSNRAT | 870 | QQYHSSPSWT | 910 |
| C1978-C7 | | | | | | |
| BCMA_EBB- | RASQSISSYLN | 831 | AASSLQS | 871 | QQSYSTPYS | 911 |
| C1978-D10 | | | | | | |
| BCMA_EBB- | RATQSIGSSFLA | 832 | GASQRAT | 872 | QHYESSPSWT | 912 |
| C1979-C12 | | | | | | |
| BCMA_EBB- | RASQSVSSSYLA | 833 | GASSRAT | 873 | QQYGSPPRFT | 913 |
| C1980-G4 | | | | | | |
| BCMA_EBB- | RASQSVSSSYLA | 834 | GASSRAT | 874 | QHYGSSPSWT | 914 |
| C1980-D2 | | | | | | |
| BCMA_EBB- | RASQRVASNYLA | 835 | GASSRAT | 875 | QHYDSSPSWT | 915 |
| C1978-A10 | | | | | | |
| BCMA_EBB- | RASQSLSSNFLA | 836 | GASNWAT | 876 | QYYGTSPMYT | 916 |
| C1978-D4 | | | | | | |
| BCMA_EBB- | RSSQSLLHSNGYNYLD | 837 | LGSNRAS | 877 | MQALQTPLT | 917 |
| C1980-A2 | | | | | | |
| BCMA_EBB- | RASQSVSSSYLA | 838 | GTSSRAT | 878 | QHYGNSPPKFT | 918 |
| C1981-C3 | | | | | | |
| BCMA_EBB- | RASQSVASSFLA | 839 | GASGRAT | 879 | QHYGGSPRLT | 919 |
| C1978-G4 | | | | | | |
| A7D12.2 | RASQDVNTAVS | 840 | SASYRYT | 880 | QQHYSTPWT | 920 |
| C11D5.3 | RASESVSVIGAHLIH | 841 | LASNLET | 881 | LQSRIFPRT | 921 |
| C12A3.2 | RASESVTILGSHLIY | 842 | LASNVQT | 882 | LQSRTIPRT | 922 |
| C13F12.1 | RASESVTILGSHLIY | 843 | LASNVQT | 883 | LQSRTIPRT | 923 |

[0360] In one embodiment, the BCMA binding domain comprises one or more (e.g., all three) light chain complementary determining region 1 (LC CDR1), light chain complementary determining region 2 (LC CDR2), and light chain complementary determining region 3 (LC CDR3) of a BCMA binding domain described herein, e.g., provided in Table 12, 13 or 15, and/or one or more (e.g., all three) heavy chain complementary determining region 1 (HC CDR1), heavy chain complementary determining region 2 (HC CDR2), and heavy chain complementary determining region 3 (HC CDR3) of a BCMA binding domain described herein, e.g., provided in Table 12, 13 or 14. In one embodiment, the BCMA binding domain comprises one, two, or all of LC CDR1, LC CDR2, and LC CDR3 of any amino acid sequences as provided in Table 12, incorporated herein by reference; and one, two or all of HC CDR1, HC CDR2, and HC CDR3 of any amino acid sequences as provided in Table 12.

[0361] In one embodiment, the BCMA antigen binding domain comprises:
[0362] (v) (a) a LC CDR1 amino acid sequence of SEQ ID NO: 814, a LC CDR2 amino acid sequence of SEQ ID NO: 854, and a LC CDR3 amino acid sequence of SEQ ID NO: 894; and
   [0363] (b) a HC CDR1 amino acid sequence of SEQ ID NO: 694, a HC CDR2 amino acid sequence of SEQ ID NO: 734, and a HC CDR3 amino acid sequence of SEQ ID NO: 774
[0364] (vi) (a) a LC CDR1 amino acid sequence of SEQ ID NO: 804, a LC CDR2 amino acid sequence of SEQ ID NO: 844, and a LC CDR3 amino acid sequence of SEQ ID NO: 884; and
   [0365] (b) a HC CDR1 amino acid sequence of SEQ ID NO: 684, a HC CDR2 amino acid sequence of SEQ ID NO: 724, and a HC CDR3 amino acid sequence of SEQ ID NO: 764
[0366] (vii) (a) a LC CDR1 amino acid sequence of SEQ ID NO: 805, a LC CDR2 amino acid sequence of SEQ ID NO: 845, and a LC CDR3 amino acid sequence of SEQ ID NO: 885; and
   [0367] (b) a HC CDR1 amino acid sequence of SEQ ID NO: 685, a HC CDR2 amino acid sequence of SEQ ID NO: 725, and a HC CDR3 amino acid sequence of SEQ ID NO: 765
[0368] (viii) (a) a LC CDR1 amino acid sequence of SEQ ID NO: 806, a LC CDR2 amino acid sequence of SEQ ID NO: 846, and a LC CDR3 amino acid sequence of SEQ ID NO: 886; and
   [0369] (b) a HC CDR1 amino acid sequence of SEQ ID NO: 686, a HC CDR2 amino acid sequence of SEQ ID NO: 726, and a HC CDR3 amino acid sequence of SEQ ID NO: 766
[0370] (ix) (a) a LC CDR1 amino acid sequence of SEQ ID NO: 807, a LC CDR2 amino acid sequence of SEQ ID NO: 847, and a LC CDR3 amino acid sequence of SEQ ID NO: 887; and
   [0371] (b) a HC CDR1 amino acid sequence of SEQ ID NO: 687, a HC CDR2 amino acid sequence of SEQ ID NO: 727, and a HC CDR3 amino acid sequence of SEQ ID NO: 767
[0372] (x) (a) a LC CDR1 amino acid sequence of SEQ ID NO: 808, a LC CDR2 amino acid sequence of SEQ ID NO: 848, and a LC CDR3 amino acid sequence of SEQ ID NO: 888; and
   [0373] (b) a HC CDR1 amino acid sequence of SEQ ID NO: 688, a HC CDR2 amino acid sequence of SEQ ID NO: 728, and a HC CDR3 amino acid sequence of SEQ ID NO: 768
[0374] (xi) (a) a LC CDR1 amino acid sequence of SEQ ID NO: 809, a LC CDR2 amino acid sequence of SEQ ID NO: 849, and a LC CDR3 amino acid sequence of SEQ ID NO: 889; and
   [0375] (b) a HC CDR1 amino acid sequence of SEQ ID NO: 689, a HC CDR2 amino acid sequence of SEQ ID NO: 729, and a HC CDR3 amino acid sequence of SEQ ID NO: 769
[0376] (xii) (a) a LC CDR1 amino acid sequence of SEQ ID NO: 810, a LC CDR2 amino acid sequence of SEQ ID NO: 850, and a LC CDR3 amino acid sequence of SEQ ID NO: 890; and
   [0377] (b) a HC CDR1 amino acid sequence of SEQ ID NO: 690, a HC CDR2 amino acid sequence of SEQ ID NO: 730, and a HC CDR3 amino acid sequence of SEQ ID NO: 770
[0378] (xiii) (a) a LC CDR1 amino acid sequence of SEQ ID NO: 811, a LC CDR2 amino acid sequence of SEQ ID NO: 851, and a LC CDR3 amino acid sequence of SEQ ID NO: 891; and
   [0379] (b) a HC CDR1 amino acid sequence of SEQ ID NO: 691, a HC CDR2 amino acid sequence of SEQ ID NO: 731, and a HC CDR3 amino acid sequence of SEQ ID NO: 771
[0380] (xiv) (a) a LC CDR1 amino acid sequence of SEQ ID NO: 812, a LC CDR2 amino acid sequence of SEQ ID NO: 852, and a LC CDR3 amino acid sequence of SEQ ID NO: 892; and
   [0381] (b) a HC CDR1 amino acid sequence of SEQ ID NO: 692, a HC CDR2 amino acid sequence of SEQ ID NO: 732, and a HC CDR3 amino acid sequence of SEQ ID NO: 772
[0382] (xv) (a) a LC CDR1 amino acid sequence of SEQ ID NO: 813, a LC CDR2 amino acid sequence of SEQ ID NO: 853, and a LC CDR3 amino acid sequence of SEQ ID NO: 893; and
   [0383] (b) a HC CDR1 amino acid sequence of SEQ ID NO: 693, a HC CDR2 amino acid sequence of SEQ ID NO: 733, and a HC CDR3 amino acid sequence of SEQ ID NO: 773
[0384] (xvi) (a) a LC CDR1 amino acid sequence of SEQ ID NO: 815, a LC CDR2 amino acid sequence of SEQ ID NO: 855, and a LC CDR3 amino acid sequence of SEQ ID NO: 895; and
   [0385] (b) a HC CDR1 amino acid sequence of SEQ ID NO: 695, a HC CDR2 amino acid sequence of SEQ ID NO: 735, and a HC CDR3 amino acid sequence of SEQ ID NO: 775
[0386] (xvii) (a) a LC CDR1 amino acid sequence of SEQ ID NO: 816, a LC CDR2 amino acid sequence of SEQ ID NO: 856, and a LC CDR3 amino acid sequence of SEQ ID NO: 896; and
   [0387] (b) a HC CDR1 amino acid sequence of SEQ ID NO: 696, a HC CDR2 amino acid sequence of SEQ ID NO: 736, and a HC CDR3 amino acid sequence of SEQ ID NO: 776
[0388] (xviii) (a) a LC CDR1 amino acid sequence of SEQ ID NO: 817, a LC CDR2 amino acid sequence of SEQ ID NO: 857, and a LC CDR3 amino acid sequence of SEQ ID NO: 897; and
   [0389] (b) a HC CDR1 amino acid sequence of SEQ ID NO: 697, a HC CDR2 amino acid sequence of SEQ ID NO: 737, and a HC CDR3 amino acid sequence of SEQ ID NO: 777
[0390] (xix) (a) a LC CDR1 amino acid sequence of SEQ ID NO: 818, a LC CDR2 amino acid sequence of SEQ ID NO: 858, and a LC CDR3 amino acid sequence of SEQ ID NO: 898; and
   [0391] (b) a HC CDR1 amino acid sequence of SEQ ID NO: 698, a HC CDR2 amino acid sequence of SEQ ID NO: 738, and a HC CDR3 amino acid sequence of SEQ ID NO: 778
[0392] (xx) (a) a LC CDR1 amino acid sequence of SEQ ID NO: 819, a LC CDR2 amino acid sequence of SEQ ID NO: 859, and a LC CDR3 amino acid sequence of SEQ ID NO: 899; and
   [0393] (b) a HC CDR1 amino acid sequence of SEQ ID NO: 699, a HC CDR2 amino acid sequence of SEQ ID NO: 739, and a HC CDR3 amino acid sequence of SEQ ID NO: 779
[0394] (xxi) (a) a LC CDR1 amino acid sequence of SEQ ID NO: 820, a LC CDR2 amino acid sequence of SEQ ID NO: 860, and a LC CDR3 amino acid sequence of SEQ ID NO: 900; and
   [0395] (b) a HC CDR1 amino acid sequence of SEQ ID NO: 700, a HC CDR2 amino acid sequence of SEQ ID NO: 740, and a HC CDR3 amino acid sequence of SEQ ID NO: 780
[0396] (xxii) (a) a LC CDR1 amino acid sequence of SEQ ID NO: 821, a LC CDR2 amino acid sequence of SEQ ID NO: 861, and a LC CDR3 amino acid sequence of SEQ ID NO: 901; and
   [0397] (b) a HC CDR1 amino acid sequence of SEQ ID NO: 701, a HC CDR2 amino acid sequence of SEQ ID NO: 741, and a HC CDR3 amino acid sequence of SEQ ID NO: 781
[0398] (xxiii) (a) a LC CDR1 amino acid sequence of SEQ ID NO: 822, a LC CDR2 amino acid sequence of SEQ ID NO: 862, and a LC CDR3 amino acid sequence of SEQ ID NO: 902; and
   [0399] (b) a HC CDR1 amino acid sequence of SEQ ID NO: 702, a HC CDR2 amino acid sequence of SEQ ID NO: 742, and a HC CDR3 amino acid sequence of SEQ ID NO: 782
[0400] (xxiv) (a) a LC CDR1 amino acid sequence of SEQ ID NO: 823, a LC CDR2 amino acid sequence of SEQ ID NO: 863, and a LC CDR3 amino acid sequence of SEQ ID NO: 903; and
   [0401] (b) a HC CDR1 amino acid sequence of SEQ ID NO: 703, a HC CDR2 amino acid sequence of SEQ ID NO: 743, and a HC CDR3 amino acid sequence of SEQ ID NO: 783
[0402] (xxv) (a) a LC CDR1 amino acid sequence of SEQ ID NO: 824, a LC CDR2 amino acid sequence of SEQ ID NO: 864, and a LC CDR3 amino acid sequence of SEQ ID NO: 904; and
   [0403] (b) a HC CDR1 amino acid sequence of SEQ ID NO: 704, a HC CDR2 amino acid sequence of SEQ ID NO: 744, and a HC CDR3 amino acid sequence of SEQ ID NO: 784
[0404] (xxvi) (a) a LC CDR1 amino acid sequence of SEQ ID NO: 825, a LC CDR2 amino acid sequence of SEQ ID NO: 865, and a LC CDR3 amino acid sequence of SEQ ID NO: 905; and
   [0405] (b) a HC CDR1 amino acid sequence of SEQ ID NO: 705, a HC CDR2 amino acid sequence of SEQ ID NO: 745, and a HC CDR3 amino acid sequence of SEQ ID NO: 785 or
[0406] (xxvii) (a) a LC CDR1 amino acid sequence of SEQ ID NO: 826, a LC CDR2 amino acid sequence of SEQ ID NO: 866, and a LC CDR3 amino acid sequence of SEQ ID NO: 906; and
   [0407] (b) a HC CDR1 amino acid sequence of SEQ ID NO: 706, a HC CDR2 amino acid sequence of SEQ ID NO: 746, and a HC CDR3 amino acid sequence of SEQ ID NO: 786.

[0408] In one embodiment, the BCMA binding domain comprises a light chain variable region described herein (e.g., in Table 12 or 13) and/or a heavy chain variable region described herein (e.g., in Table 12 or 13). In one embodiment, the BCMA binding domain is a scFv comprising a light chain and a heavy chain of an amino acid sequence listed in Table 12 or 13. In an embodiment, the BCMA binding domain (e.g., an scFv) comprises: a light chain variable region comprising an amino acid sequence having at least one, two or three modifications (e.g., substitutions, e.g., conservative substitutions) but not more than 30, 20 or 10 modifications (e.g., substitutions, e.g., conservative substitutions) of an amino acid sequence of a light chain variable region provided in Table 12 or 13, or a sequence with 95-99% identity with an amino acid sequence provided in Table 12 or 13; and/or a heavy chain variable region comprising an amino acid sequence having at least one, two or three modifications (e.g., substitutions, e.g., conservative substitutions) but not more than 30, 20 or 10 modifications (e.g., substitutions, e.g., conservative substitutions) of an amino acid sequence of a heavy chain variable region provided in Table 12 or 13, or a sequence with 95-99% identity to an amino acid sequence provided in Table 12 or 13.

[0409] In one embodiment, the BCMA binding domain comprises an amino acid sequence selected from a group consisting of SEQ ID NO: 349; SEQ ID NO: 339, SEQ ID NO: 340; SEQ ID NO: 341; SEQ ID NO: 342; SEQ ID NO: 343; SEQ ID NO: 344, SEQ ID NO: 345, SEQ ID NO: 346, SEQ ID NO: 347, SEQ ID NO: 348, SEQ ID NO: 350, SEQ ID NO: 351, SEQ ID NO: 352, SEQ ID NO: 353, SEQ ID NO: 429, SEQ ID NO: 430, SEQ ID NO: 431, SEQ ID NO: 432, SEQ ID NO: 433, SEQ ID NO: 434, SEQ ID NO: 435, SEQ ID NO: 436, SEQ ID NO: 437, SEQ ID NO: 438, SEQ ID NO: 439, SEQ ID NO: 440, SEQ ID NO: 441, SEQ ID NO: 442, SEQ ID NO: 443, SEQ ID NO: 444, SEQ ID NO: 445, SEQ ID NO: 446, SEQ ID NO: 447, SEQ ID NO: 448, SEQ ID NO: 449, SEQ ID NO: 563, SEQ ID NO: 564, SEQ ID NO: 565 and SEQ ID NO: 566; or an amino acid sequence having at least one, two or three modifications (e.g., substitutions, e.g., conservative substitutions) but not more than 30, 20 or 10 modifications (e.g., substitutions, e.g., conservative substitutions) to any of the aforesaid sequences; or a sequence with 95-99% identity to any of the aforesaid sequences. In one embodiment, the BCMA binding domain is a scFv, and a light chain variable region comprising an amino acid sequence described herein, e.g., in Table 12 or 13, is attached to a heavy chain variable region comprising an amino acid sequence described herein, e.g., in Table 12 or 13, via a linker, e.g., a linker described herein. In one embodiment, the BCMA binding domain includes a (Gly4-Ser)n linker, wherein n is 1, 2, 3, 4, 5, or 6, preferably 4 (SEQ ID NO: 80). The light chain variable region and heavy chain variable region of a scFv can be, e.g., in any of the following orientations: light chain variable region-linker-heavy chain variable region or heavy chain variable region-linker-light chain variable region.

[0410] Any known BCMA CAR, e.g., the BMCA antigen binding domain of any known BCMA CAR, in the art can be used in accordance with the instant invention to construct a CAR. For example, those described herein.

[0411] In one embodiment, an antigen binding domain against ROR1 is an antigen binding portion, e.g., CDRs, of an antibody described in, e.g., Hudecek et al., Clin Cancer Res 19(12):3153-3164 (2013); WO 2011159847; and US20130101607.

[0412] In one embodiment, an antigen binding domain against CD22 is an antigen binding portion, e.g., CDRs, of an antibody described in, e.g., Haso et al., Blood, 121(7): 1165-1174 (2013); Wayne et al., Clin Cancer Res 16(6): 1894-1903 (2010); Kato et al., Leuk Res 37(1):83-88 (2013); Creative BioMart (creativebiomart.net): MOM-18047-S(P).

[0413] In one embodiment, an antigen binding domain against CD20 is an antigen binding portion, e.g., CDRs, of the antibody Rituximab, Ofatumumab, Ocrelizumab, Veltuzumab, or GA101, or derivatives thereof.

[0414] In one embodiment, the antigen binding domain comprises one, two three (e.g., all three) heavy chain CDRs, HC CDR1, HC CDR2 and HC CDR3, from an antibody listed above, and/or one, two, three (e.g., all three) light chain CDRs, LC CDR1, LC CDR2 and LC CDR3, from an antibody that binds a tumor antigen or a B cell antigen listed above. In one embodiment, the antigen binding domain comprises a heavy chain variable region and/or a variable light chain region of an antibody that binds a tumor antigen or a B cell antigen listed above.

[0415] A humanized antibody can be produced using a variety of techniques known in the art, including but not limited to, CDR-grafting (see, e.g., European Patent No. EP 239,400; International Publication No. WO 91/09967; and U.S. Pat. Nos. 5,225,539, 5,530,101, and 5,585,089, each of which is incorporated herein in its entirety by reference), veneering or resurfacing (see, e.g., European Patent Nos. EP 592,106 and EP 519,596; Padlan, 1991, Molecular Immunology, 28(4/5):489-498; Studnicka et al., 1994, Protein Engineering, 7(6):805-814; and Roguska et al., 1994, PNAS, 91:969-973, each of which is incorporated herein by its entirety by reference), chain shuffling (see, e.g., U.S. Pat. No. 5,565,332, which is incorporated herein in its entirety by reference), and techniques disclosed in, e.g., U.S. Patent Application Publication No. US2005/0042664, U.S. Patent Application Publication No. US2005/0048617, U.S. Pat. Nos. 6,407,213, 5,766,886, International Publication No. WO 9317105, Tan et al., J. Immunol., 169:1119-25 (2002), Caldas et al., Protein Eng., 13(5):353-60 (2000), Morea et al., Methods, 20(3):267-79 (2000), Baca et al., J. Biol. Chem., 272(16):10678-84 (1997), Roguska et al., Protein Eng., 9(10):895-904 (1996), Couto et al., Cancer Res., 55 (23 Supp):5973s-5977s (1995), Couto et al., Cancer Res., 55(8):1717-22 (1995), Sandhu J S, Gene, 150(2):409-10 (1994), and Pedersen et al., J. Mol. Biol., 235(3):959-73 (1994), each of which is incorporated herein in its entirety by reference. Often, framework residues in the framework regions will be substituted with the corresponding residue from the CDR donor antibody to alter, for example improve, antigen binding. These framework substitutions are identified by methods well-known in the art, e.g., by modeling of the interactions of the CDR and framework residues to identify framework residues important for antigen binding and sequence comparison to identify unusual framework residues at particular positions. (See, e.g., Queen et al., U.S. Pat. No. 5,585,089; and Riechmann et al., 1988, Nature, 332:323, which are incorporated herein by reference in their entireties.)

[0416] Examples of solid tumor associated antigens (i.e., solid tumor antigens) include, without limitation: EGFRvIII, mesothelin, GD2, Tn antigen, sTn antigen, Tn-O-Glycopeptides, sTn-O-Glycopeptides, PSMA, CD97, TAG72, CD44v6, CEA, EPCAM, KIT, IL-13Rα2, leguman, GD3, CD171, IL-11Rα, PSCA, MAD-CT-1, MAD-CT-2, VEGFR2, LewisY, CD24, PDGFR-beta, SSEA-4, folate receptor alpha, ERBBs (e.g., ERBB2), Her2/neu, MUC1, EGFR, NCAM, Ephrin B2, CAIX, LMP2, sLe, HMWMAA, o-acetyl-GD2, folate receptor beta, TEM1/CD248, TEM7R, FAP, Legumain, HPV E6 or E7, ML-IAP, CLDN6, TSHR, GPRC5D, ALK, Polysialic acid, Fos-related antigen, neutrophil elastase, TRP-2, CYP1B1, sperm protein 17, beta human chorionic gonadotropin, AFP, thyroglobulin, PLAC1, globoH, RAGE1, MN-CA IX, human telomerase reverse transcriptase, intestinal carboxyl esterase, mut hsp 70-2, NA-17, NY-BR-1, UPK2, HAVCR1, ADRB3, PANX3, NY-ESO-1, GPR20, Ly6k, OR51E2, TARP, GFRα4, and a peptide of any of these antigens presented on MHC.

[0417] In one aspect, the CAR comprises an antigen binding domain that binds to a B cell antigen. In one embodiment, the CAR comprises a CD19 antigen binding domain (e.g., a murine, human or humanized antibody or antibody fragment that specifically binds to CD19), a transmembrane domain, and an intracellular signaling domain (e.g., an intracellular signaling domain comprising a costimulatory domain and/or a primary signaling domain).

[0418] Exemplary CAR molecules described herein are provided in Table 10. The CAR molecules in Table 10 comprise a CD19 antigen binding domain, e.g., an amino acid sequence of any CD19 antigen binding domain provided in Table 6.

TABLE 10
Exemplary CD19 CAR molecules

| | | | SEQ |
|---|---|---|---|
| B cell | | | ID |
| antigen | Name | Amino Acid Sequence | NO: |
| CD19 | CTL019 | MALPVTALLLPLALLLHAARPDIQMTQTTSSLSASLGDRVTISCRASQDISKYL | 281 |
| | | NWYQQKPDGTVKLLIYHTSRLHSGVPSRFSGSGSGTDYSLTISNLEQEDIATYF | |
| | | CQQGNTLPYTFGGGTKLEITGGGGSGGGGSGGGGSEVKLQESGPGLVAPSQSLS | |
| | | VTCTVSGVSLPDYGVSWIRQPPRKGLEWLGVIWGSETTYYNSALKSRLTIIKDN | |
| | | SKSQVFLKMNSLQTDDTAIYYCAKHYYYGGSYAMDYWGQGTSVTVSSTTTPAPR | |
| | | PPTPAPTIASQPLSLRPEACRPAAGGAVHTRGLDFACDIYIWAPLAGTCGVLLL | |
| | | SLVITLYCKRGRKKLLYIFKQPFMRPVQTTQEEDGCSCRFPEEEEGGCELRVKF | |
| | | SRSADAPAYKQGQNQLYNELNLGRREEYDVLDKRRGRDPEMGGKPRRKNPQEGL | |
| | | YNELQKDKMAEAYSEIGMKGERRRGKGHDGLYQGLSTATKDTYDALHMQALPPR | |
| CD19 | CAR 1 | MALPVTALLLPLALLLHAARPEIVMTQSPATLSLSPGERATLSCRASQDISKYL | 269 |
| | | NWYQQKPGQAPRLLIYHTSRLHSGIPARFSGSGSGTDYTLTISSLQPEDFAVYF | |
| | | CQQGNTLPYTFGQGTKLEIKGGGGSGGGGSGGGGSQVQLQESGPGLVKPSETLS | |
| | | LTCTVSGVSLPDYGVSWIRQPPGKGLEWIGVIWGSETTYYSSSLKSRVTISKDN | |
| | | SKNQVSLKLSSVTAADTAVYYCAKHYYYGGSYAMDYWGQGTLVTVSSTTTPAPR | |
| | | PPTPAPTIASQPLSLRPEACRPAAGGAVHTRGLDFACDIYIWAPLAGTCGVLLL | |
| | | SLVITLYCKRGRKKLLYIFKQPFMRPVQTTQEEDGCSCRFPEEEEGGCELRVKF | |
| | | SRSADAPAYKQGQNQLYNELNLGRREEYDVLDKRRGRDPEMGGKPRRKNPQEGL | |
| | | YNELQKDKMAEAYSEIGMKGERRRGKGHDGLYQGLSTATKDTYDALHMQALPPR | |
| CD19 | CAR 2 | MALPVTALLLPLALLLHAARPEIVMTQSPATLSLSPGERATLSCRASQDISKYL | 270 |
| | | NWYQQKPGQAPRLLIYHTSRLHSGIPARFSGSGSGTDYTLTISSLQPEDFAVYF | |
| | | CQQGNTLPYTFGQGTKLEIKGGGGSGGGGSGGGGSQVQLQESGPGLVKPSETLS | |
| | | LTCTVSGVSLPDYGVSWIRQPPGKGLEWIGVIWGSETTYYQSSLKSRVTISKDN | |
| | | SKNQVSLKLSSVTAADTAVYYCAKHYYYGGSYAMDYWGQGTLVTVSSTTTPAPR | |
| | | PPTPAPTIASQPLSLRPEACRPAAGGAVHTRGLDFACDIYIWAPLAGTCGVLLL | |
| | | SLVITLYCKRGRKKLLYIFKQPFMRPVQTTQEEDGCSCRFPEEEEGGCELRVKF | |
| | | SRSADAPAYKQGQNQLYNELNLGRREEYDVLDKRRGRDPEMGGKPRRKNPQEGL | |
| | | YNELQKDKMAEAYSEIGMKGERRRGKGHDGLYQGLSTATKDTYDALHMQALPPR | |
| CD19 | CAR 3 | MALPVTALLLPLALLLHAARPQVQLQESGPGLVKPSETLSLTCTVSGVSLPDYG | 271 |
| | | VSWIRQPPGKGLEWIGVIWGSETTYYSSSLKSRVTISKDNSKNQVSLKLSSVTA | |
| | | ADTAVYYCAKHYYYGGSYAMDYWGQGTLVTVSSGGGGSGGGGSGGGGSEIVMTQ | |
| | | SPATLSLSPGERATLSCRASQDISKYLNWYQQKPGQAPRLLIYHTSRLHSGIPA | |
| | | RFSGSGSGTDYTLTISSLQPEDFAVYFCQQGNTLPYTFGQGTKLEIKTTTPAPR | |
| | | PPTPAPTIASQPLSLRPEACRPAAGGAVHTRGLDFACDIYIWAPLAGTCGVLLL | |
| | | SLVITLYCKRGRKKLLYIFKQPFMRPVQTTQEEDGCSCRFPEEEEGGCELRVKF | |
| | | SRSADAPAYKQGQNQLYNELNLGRREEYDVLDKRRGRDPEMGGKPRRKNPQEGL | |
| | | YNELQKDKMAEAYSEIGMKGERRRGKGHDGLYQGLSTATKDTYDALHMQALPPR | |
| CD19 | CAR 4 | MALPVTALLLPLALLLHAARPQVQLQESGPGLVKPSETLSLTCTVSGVSLPDYG | 272 |
| | | VSWIRQPPGKGLEWIGVIWGSETTYYQSSLKSRVTISKDNSKNQVSLKLSSVTA | |
| | | ADTAVYYCAKHYYYGGSYAMDYWGQGTLVTVSSGGGGSGGGGSGGGGSEIVMTQ | |
| | | SPATLSLSPGERATLSCRASQDISKYLNWYQQKPGQAPRLLIYHTSRLHSGIPA | |
| | | RFSGSGSGTDYTLTISSLQPEDFAVYFCQQGNTLPYTFGQGTKLEIKTTTPAPR | |
| | | PPTPAPTIASQPLSLRPEACRPAAGGAVHTRGLDFACDIYIWAPLAGTCGVLLL | |
| | | SLVITLYCKRGRKKLLYIFKQPFMRPVQTTQEEDGCSCRFPEEEEGGCELRVKF | |
| | | SRSADAPAYKQGQNQLYNELNLGRREEYDVLDKRRGRDPEMGGKPRRKNPQEGL | |
| | | YNELQKDKMAEAYSEIGMKGERRRGKGHDGLYQGLSTATKDTYDALHMQALPPR | |
| CD19 | CAR 5 | MALPVTALLLPLALLLHAARPEIVMTQSPATLSLSPGERATLSCRASQDISKYL | 273 |
| | | NWYQQKPGQAPRLLIYHTSRLHSGIPARFSGSGSGTDYTLTISSLQPEDFAVYF | |
| | | CQQGNTLPYTFGQGTKLEIKGGGGSGGGGSGGGGSGGGGSQVQLQESGPGLVKP | |
| | | SETLSLTCTVSGVSLPDYGVSWIRQPPGKGLEWIGVIWGSETTYYSSSLKSRVT | |
| | | ISKDNSKNQVSLKLSSVTAADTAVYYCAKHYYYGGSYAMDYWGQGTLVTVSSTT | |
| | | TPAPRPPTPAPTIASQPLSLRPEACRPAAGGAVHTRGLDFACDIYIWAPLAGTC | |
| | | GVLLLSLVITLYCKRGRKKLLYIFKQPFMRPVQTTQEEDGCSCRFPEEEEGGCE | |
| | | LRVKFSRSADAPAYKQGQNQLYNELNLGRREEYDVLDKRRGRDPEMGGKPRRKN | |
| | | PQEGLYNELQKDKMAEAYSEIGMKGERRRGKGHDGLYQGLSTATKDTYDALHMQ | |
| | | ALPPR | |
| CD19 | CAR 6 | MALPVTALLLPLALLLHAARPEIVMTQSPATLSLSPGERATLSCRASQDISKYL | 274 |
| | | NWYQQKPGQAPRLLIYHTSRLHSGIPARFSGSGSGTDYTLTISSLQPEDFAVYF | |
| | | CQQGNTLPYTFGQGTKLEIKGGGGSGGGGSGGGGSGGGGSQVQLQESGPGLVKP | |
| | | SETLSLTCTVSGVSLPDYGVSWIRQPPGKGLEWIGVIWGSETTYYQSSLKSRVT | |
| | | ISKDNSKNQVSLKLSSVTAADTAVYYCAKHYYYGGSYAMDYWGQGTLVTVSSTT | |
| | | TPAPRPPTPAPTIASQPLSLRPEACRPAAGGAVHTRGLDFACDIYIWAPLAGTC | |
| | | GVLLLSLVITLYCKRGRKKLLYIFKQPFMRPVQTTQEEDGCSCRFPEEEEGGCE | |
| | | LRVKFSRSADAPAYKQGQNQLYNELNLGRREEYDVLDKRRGRDPEMGGKPRRKN | |
| | | PQEGLYNELQKDKMAEAYSEIGMKGERRRGKGHDGLYQGLSTATKDTYDALHMQ | |
| | | ALPPR | |
| CD19 | CAR 7 | MALPVTALLLPLALLLHAARPQVQLQESGPGLVKPSETLSLTCTVSGVSLPDYG | 275 |
| | | VSWIRQPPGKGLEWIGVIWGSETTYYSSSLKSRVTISKDNSKNQVSLKLSSVTA | |
| | | ADTAVYYCAKHYYYGGSYAMDYWGQGTLVTVSSGGGGSGGGGSGGGGSGGGGSE | |
| | | IVMTQSPATLSLSPGERATLSCRASQDISKYLNWYQQKPGQAPRLLIYHTSRLH | |
| | | SGIPARFSGSGSGTDYTLTISSLQPEDFAVYFCQQGNTLPYTFGQGTKLEIKTT | |
| | | TPAPRPPTPAPTIASQPLSLRPEACRPAAGGAVHTRGLDFACDIYIWAPLAGTC | |
| | | GVLLLSLVITLYCKRGRKKLLYIFKQPFMRPVQTTQEEDGCSCRFPEEEEGGCE | |
| | | LRVKFSRSADAPAYKQGQNQLYNELNLGRREEYDVLDKRRGRDPEMGGKPRRKN | |
| | | PQEGLYNELQKDKMAEAYSEIGMKGERRRGKGHDGLYQGLSTATKDTYDALHMQ | |
| | | ALPPR | |
| CD19 | CAR 8 | MALPVTALLLPLALLLHAARPQVQLQESGPGLVKPSETLSLTCTVSGVSLPDYG | 276 |
| | | VSWIRQPPGKGLEWIGVIWGSETTYYQSSLKSRVTISKDNSKNQVSLKLSSVTA | |
| | | ADTAVYYCAKHYYYGGSYAMDYWGQGTLVTVSSGGGGSGGGGSGGGGSGGGGSE | |
| | | IVMTQSPATLSLSPGERATLSCRASQDISKYLNWYQQKPGQAPRLLIYHTSRLH | |
| | | SGIPARFSGSGSGTDYTLTISSLQPEDFAVYFCQQGNTLPYTFGQGTKLEIKTT | |
| | | TPAPRPPTPAPTIASQPLSLRPEACRPAAGGAVHTRGLDFACDIYIWAPLAGTC | |
| | | GVLLLSLVITLYCKRGRKKLLYIFKQPFMRPVQTTQEEDGCSCRFPEEEEGGCE | |
| | | LRVKFSRSADAPAYKQGQNQLYNELNLGRREEYDVLDKRRGRDPEMGGKPRRKN | |
| | | PQEGLYNELQKDKMAEAYSEIGMKGERRRGKGHDGLYQGLSTATKDTYDALHMQ | |
| | | ALPPR | |
| CD19 | CAR 9 | MALPVTALLLPLALLLHAARPEIVMTQSPATLSLSPGERATLSCRASQDISKYL | 277 |
| | | NWYQQKPGQAPRLLIYHTSRLHSGIPARFSGSGSGTDYTLTISSLQPEDFAVYF | |
| | | CQQGNTLPYTFGQGTKLEIKGGGGSGGGGSGGGGSGGGGSQVQLQESGPGLVKP | |
| | | SETLSLTCTVSGVSLPDYGVSWIRQPPGKGLEWIGVIWGSETTYYNSSLKSRVT | |
| | | ISKDNSKNQVSLKLSSVTAADTAVYYCAKHYYYGGSYAMDYWGQGTLVTVSSTT | |
| | | TPAPRPPTPAPTIASQPLSLRPEACRPAAGGAVHTRGLDFACDIYIWAPLAGTC | |
| | | GVLLLSLVITLYCKRGRKKLLYIFKQPFMRPVQTTQEEDGCSCRFPEEEEGGCE | |
| | | LRVKFSRSADAPAYKQGQNQLYNELNLGRREEYDVLDKRRGRDPEMGGKPRRKN | |
| | | PQEGLYNELQKDKMAEAYSEIGMKGERRRGKGHDGLYQGLSTATKDTYDALHMQ | |
| | | ALPPR | |
| CD19 | CAR 10 | MALPVTALLLPLALLLHAARPEIVMTQSPATLSLSPGERATLSCRASQDISKYL | 278 |
| | | NWYQQKPGQAPRLLIYHTSRLHSGIPARFSGSGSGTDYTLTISSLQPEDFAVYF | |
| | | CQQGNTLPYTFGQGTKLEIKGGGGSGGGGSGGGGSGGGGSQVQLQESGPGLVKP | |
| | | SETLSLTCTVSGVSLPDYGVSWIRQPPGKGLEWIGVIWGSETTYYNSSLKSRVT | |
| | | ISKDNSKNQVSLKLSSVTAADTAVYYCAKHYYYGGSYAMDYWGQGTLVTVSSTT | |
| | | TPAPRPPTPAPTIASQPLSLRPEACRPAAGGAVHTRGLDFACDIYIWAPLAGTC | |
| | | GVLLLSLVITLYCKRGRKKLLYIFKQPFMRPVQTTQEEDGCSCRFPEEEEGGCE | |
| | | LRVKFSRSADAPAYKQGQNQLYNELNLGRREEYDVLDKRRGRDPEMGGKPRRKN | |
| | | PQEGLYNELQKDKMAEAYSEIGMKGERRRGKGHDGLYQGLSTATKDTYDALHMQ | |
| | | ALPPR | |
| CD19 | CAR 11 | MALPVTALLLPLALLLHAARPQVQLQESGPGLVKPSETLSLTCTVSGVSLPDYG | 279 |
| | | VSWIRQPPGKGLEWIGVIWGSETTYYNSSLKSRVTISKDNSKNQVSLKLSSVTA | |
| | | ADTAVYYCAKHYYYGGSYAMDYWGQGTLVTVSSGGGGSGGGGSGGGGSGGGGSE | |
| | | IVMTQSPATLSLSPGERATLSCRASQDISKYLNWYQQKPGQAPRLLIYHTSRLH | |
| | | SGIPARFSGSGSGTDYTLTISSLQPEDFAVYFCQQGNTLPYTFGQGTKLEIKTT | |
| | | TPAPRPPTPAPTIASQPLSLRPEACRPAAGGAVHTRGLDFACDIYIWAPLAGTC | |
| | | GVLLLSLVITLYCKRGRKKLLYIFKQPFMRPVQTTQEEDGCSCRFPEEEEGGCE | |
| | | LRVKFSRSADAPAYKQGQNQLYNELNLGRREEYDVLDKRRGRDPEMGGKPRRKN | |
| | | PQEGLYNELQKDKMAEAYSEIGMKGERRRGKGHDGLYQGLSTATKDTYDALHMQ | |
| | | ALPPR | |
| CD19 | CAR 12 | MALPVTALLLPLALLLHAARPEIVMTQSPATLSLSPGERATLSCRASQDISKYL | 280 |
| | | NWYQQKPGQAPRLLIYHTSRLHSGIPARFSGSGSGTDYTLTISSLQPEDFAVYF | |
| | | CQQGNTLPYTFGQGTKLEIKGGGGSGGGGSGGGGSQVQLQESGPGLVKPSETLS | |
| | | LTCTVSGVSLPDYGVSWIRQPPGKGLEWIGVIWGSETTYYNSSLKSRVTISKDN | |
| | | SKNQVSLKLSSVTAADTAVYYCAKHYYYGGSYAMDYWGQGTLVTVSSTTTPAPR | |
| | | PPTPAPTIASQPLSLRPEACRPAAGGAVHTRGLDFACDIYIWAPLAGTCGVLLL | |
| | | SLVITLYCKRGRKKLLYIFKQPFMRPVQTTQEEDGCSCRFPEEEEGGCELRVKF | |
| | | SRSADAPAYKQGQNQLYNELNLGRREEYDVLDKRRGRDPEMGGKPRRKNPQEGL | |
| | | YNELQKDKMAEAYSEIGMKGERRRGKGHDGLYQGLSTATKDTYDALHMQALPPR | |

[0419] In one embodiment, the CAR molecule comprises (e.g., consists of) an amino acid sequence as provided in Table 10, or in Table 3 of International Publication No. WO2014/153270, filed Mar. 15, 2014; incorporated herein by reference. In one embodiment, the CAR molecule (e.g., consists of) an amino acid sequence of SEQ ID NO: 269, SEQ ID NO: 270, SEQ ID NO: 271, SEQ ID NO: 272, SEQ ID NO: 273, SEQ ID NO: 274, SEQ ID NO: 275, SEQ ID NO: 276, SEQ ID NO: 277, SEQ ID NO: 278, SEQ ID NO: 279, SEQ ID NO: 280, or SEQ ID NO: 281; or an amino acid sequence having at least one, two, three, four, five, 10, 15, 20 or 30 modifications (e.g., substitutions, e.g., conservative substitutions) but not more than 60, 50, or 40 modifications (e.g., substitutions, e.g., conservative substitutions) of an amino acid sequence of SEQ ID NO: 269, SEQ ID NO: 270, SEQ ID NO: 271, SEQ ID NO: 272, SEQ ID NO: 273, SEQ ID NO: 274, SEQ ID NO: 275, SEQ ID NO: 276, SEQ ID NO: 277, SEQ ID NO: 278, SEQ ID NO: 279, SEQ ID NO: 280, or SEQ ID NO: 281; or an amino acid sequence having 85%, 90%, 95%, 96%, 97%, 98%, 99% identity to an amino acid sequence of SEQ ID NO: 269, SEQ ID NO: 270, SEQ ID NO: 271, SEQ ID NO: 272, SEQ ID NO: 273, SEQ ID NO: 274, SEQ ID NO: 275, SEQ ID NO: 276, SEQ ID NO: 277, SEQ ID NO: 278, SEQ ID NO: 279, SEQ ID NO: 280, or SEQ ID NO: 281.

[0420] In one aspect, the CAR comprises an antigen binding domain that binds to a B cell antigen. In one embodiment, CAR comprises a BCMA antigen binding domain (e.g., a murine, human or humanized antibody or antibody fragment that specifically binds to BCMA, e.g., human BCMA), a transmembrane domain, and an intracellular signaling domain (e.g., an intracellular signaling domain comprising a costimulatory domain and/or a primary signaling domain).

[0421] Exemplary CAR molecules described herein are provided in Table 29, or Table 1 of WO2016/014565, or as otherwise described herein. The CAR molecules in Table 29 comprise a BCMA antigen binding domain, e.g., an amino acid sequence of any BCMA antigen binding domain provided in Table 12 or 13.

TABLE 29
Exemplary BCMA CAR molecules. Sequences
are provided with a leader sequence.

| | | |
|---|---|---|
| | SEQ | |
| Name/ | ID | |
| Description | NO: | Sequence |

139109

| | | |
|---|---|---|
| 139109-aa | 959 | MALPVTALLLPLALLLHAARPEVQLVESGGGLVQPGGSLRLSCAVSGFALS |
| Full CAR | | NHGMSWVRRAPGKGLEWVSGIVYSGSTYYAASVKGRFTISRDNSRNTLYLQ |
| | | MNSLRPEDTAIYYCSAHGGESDVWGQGTTVTVSSASGGGGSGGRASGGGGS |
| | | DIQLTQSPSSLSASVGDRVTITCRASQSISSYLNWYQQKPGKAPKLLIYAA |
| | | SSLQSGVPSRFSGSGSGTDFTLTISSLQPEDFATYYCQQSYSTPYTFGQGT |
| | | KVEIKTTTPAPRPPTPAPTIASQPLSLRPEACRPAAGGAVHTRGLDFACDI |
| | | YIWAPLAGTCGVLLLSLVITLYCKRGRKKLLYIFKQPFMRPVQTTQEEDGC |
| | | SCRFPEEEEGGCELRVKFSRSADAPAYKQGQNQLYNELNLGRREEYDVLDK |
| | | RRGRDPEMGGKPRRKNPQEGLYNELQKDKMAEAYSEIGMKGERRRGKGHDG |
| | | LYQGLSTATKDTYDALHMQALPPR |
| 139109-nt | 974 | ATGGCCCTCCCTGTCACCGCCCTGCTGCTTCCGCTGGCTCTTCTGCTCCAC |
| Full CAR | | GCCGCTCGGCCCGAAGTGCAATTGGTGGAATCAGGGGGAGGACTTGTGCAG |
| | | CCTGGAGGATCGCTGAGACTGTCATGTGCCGTGTCCGGCTTTGCCCTGTCC |
| | | AACCACGGGATGTCCTGGGTCCGCCGCGCGCCTGGAAAGGGCCTCGAATGG |
| | | GTGTCGGGTATTGTGTACAGCGGTAGCACCTACTATGCCGCATCCGTGAAG |
| | | GGGAGATTCACCATCAGCCGGGACAACTCCAGGAACACTCTGTACCTCCAA |
| | | ATGAATTCGCTGAGGCCAGAGGACACTGCCATCTACTACTGCTCCGCGCAT |
| | | GGCGGAGAGTCCGACGTCTGGGGACAGGGGACCACCGTGACCGTGTCTAGC |
| | | GCGTCCGGCGGAGGCGGCAGCGGGGGTCGGGCATCAGGGGGCGGCGGATCG |
| | | GACATCCAGCTCACCCAGTCCCCGAGCTCGCTGTCCGCCTCCGTGGGAGAT |
| | | CGGGTCACCATCACGTGCCGCGCCAGCCAGTCGATTTCCTCCTACCTGAAC |
| | | TGGTACCAACAGAAGCCCGGAAAAGCCCCGAAGCTTCTCATCTACGCCGCC |
| | | TCGAGCCTGCAGTCAGGAGTGCCCTCACGGTTCTCCGGCTCCGGTTCCGGT |
| | | ACTGATTTCACCCTGACCATTTCCTCCCTGCAACCGGAGGACTTCGCTACT |
| | | TACTACTGCCAGCAGTCGTACTCCACCCCCTACACTTTCGGACAAGGCACC |
| | | AAGGTCGAAATCAAGACCACTACCCCAGCACCGAGGCCACCCACCCCGGCT |
| | | CCTACCATCGCCTCCCAGCCTCTGTCCCTGCGTCCGGAGGCATGTAGACCC |
| | | GCAGCTGGTGGGGCCGTGCATACCCGGGGTCTTGACTTCGCCTGCGATATC |
| | | TACATTTGGGCCCCTCTGGCTGGTACTTGCGGGGTCCTGCTGCTTTCACTC |
| | | GTGATCACTCTTTACTGTAAGCGCGGTCGGAAGAAGCTGCTGTACATCTTT |
| | | AAGCAACCCTTCATGAGGCCTGTGCAGACTACTCAAGAGGAGGACGGCTGT |
| | | TCATGCCGGTTCCCAGAGGAGGAGGAAGGCGGCTGCGAACTGCGCGTGAAA |
| | | TTCAGCCGCAGCGCAGATGCTCCAGCCTACAAGCAGGGGCAGAACCAGCTC |
| | | TACAACGAACTCAATCTTGGTCGGAGAGAGGAGTACGACGTGCTGGACAAG |
| | | CGGAGAGGACGGGACCCAGAAATGGGCGGGAAGCCGCGCAGAAAGAATCCC |
| | | CAAGAGGGCCTGTACAACGAGCTCCAAAAGGATAAGATGGCAGAAGCCTAT |
| | | AGCGAGATTGGTATGAAAGGGGAACGCAGAAGAGGCAAAGGCCACGACGGA |
| | | CTGTACCAGGGACTCAGCACCGCCACCAAGGACACCTATGACGCTCTTCAC |
| | | ATGCAGGCCCTGCCGCCTCGG |

139103

| | | |
|---|---|---|
| 139103-aa | 949 | MALPVTALLLPLALLLHAARPQVQLVESGGGLVQPGRSLRLSCAASGFTFS |
| Full CAR | | NYAMSWVRQAPGKGLGWVSGISRSGENTYYADSVKGRFTISRDNSKNTLYL |
| | | QMNSLRDEDTAVYYCARSPAHYYGGMDVWGQGTTVTVSSASGGGGSGGRAS |
| | | GGGGSDIVLTQSPGTLSLSPGERATLSCRASQSISSSFLAWYQQKPGQAPR |
| | | LLIYGASRRATGIPDRFSGSGSGTDFTLTISRLEPEDSAVYYCQQYHSSPS |
| | | WTFGQGTKLEIKTTTPAPRPPTPAPTIASQPLSLRPEACRPAAGGAVHTRG |
| | | LDFACDIYIWAPLAGTCGVLLLSLVITLYCKRGRKKLLYIFKQPFMRPVQT |
| | | TQEEDGCSCRFPEEEEGGCELRVKFSRSADAPAYKQGQNQLYNELNLGRRE |
| | | EYDVLDKRRGRDPEMGGKPRRKNPQEGLYNELQKDKMAEAYSEIGMKGERR |
| | | RGKGHDGLYQGLSTATKDTYDALHMQALPPR |
| 139103-nt | 964 | ATGGCCCTCCCTGTCACCGCCCTGCTGCTTCCGCTGGCTCTTCTGCTCCAC |
| Full CAR | | GCCGCTCGGCCCCAAGTGCAACTCGTGGAATCTGGTGGAGGACTCGTGCAA |
| | | CCCGGAAGATCGCTTAGACTGTCGTGTGCCGCCAGCGGGTTCACTTTCTCG |
| | | AACTACGCGATGTCCTGGGTCCGCCAGGCACCCGGAAAGGGACTCGGTTGG |
| | | GTGTCCGGCATTTCCCGGTCCGGCGAAAATACCTACTACGCCGACTCCGTG |
| | | AAGGGCCGCTTCACCATCTCAAGGGACAACAGCAAAAACACCCTGTACTTG |
| | | CAAATGAACTCCCTGCGGGATGAAGATACAGCCGTGTACTATTGCGCCCGG |
| | | TCGCCTGCCCATTACTACGGCGGAATGGACGTCTGGGGACAGGGAACCACT |
| | | GTGACTGTCAGCAGCGCGTCGGGTGGCGGCGGCTCAGGGGGTCGGGCCTCC |
| | | GGGGGGGGAGGGTCCGACATCGTGCTGACCCAGTCCCCGGGAACCCTGAGC |
| | | CTGAGCCCGGGAGAGCGCGCGACCCTGTCATGCCGGGCATCCCAGAGCATT |
| | | AGCTCCTCCTTTCTCGCCTGGTATCAGCAGAAGCCCGGACAGGCCCCGAGG |
| | | CTGCTGATCTACGGCGCTAGCAGAAGGGCTACCGGAATCCCAGACCGGTTC |
| | | TCCGGCTCCGGTTCCGGGACCGATTTCACCCTTACTATCTCGCGCCTGGAA |
| | | CCTGAGGACTCCGCCGTCTACTACTGCCAGCAGTACCACTCATCCCCGTCG |
| | | TGGACGTTCGGACAGGGCACCAAGCTGGAGATTAAGACCACTACCCCAGCA |
| | | CCGAGGCCACCCACCCCGGCTCCTACCATCGCCTCCCAGCCTCTGTCCCTG |
| | | CGTCCGGAGGCATGTAGACCCGCAGCTGGTGGGGCCGTGCATACCCGGGGT |
| | | CTTGACTTCGCCTGCGATATCTACATTTGGGCCCCTCTGGCTGGTACTTGC |
| | | GGGGTCCTGCTGCTTTCACTCGTGATCACTCTTTACTGTAAGCGCGGTCGG |
| | | AAGAAGCTGCTGTACATCTTTAAGCAACCCTTCATGAGGCCTGTGCAGACT |
| | | ACTCAAGAGGAGGACGGCTGTTCATGCCGGTTCCCAGAGGAGGAGGAAGGC |
| | | GGCTGCGAACTGCGCGTGAAATTCAGCCGCAGCGCAGATGCTCCAGCCTAC |
| | | AAGCAGGGGCAGAACCAGCTCTACAACGAACTCAATCTTGGTCGGAGAGAG |
| | | GAGTACGACGTGCTGGACAAGCGGAGAGGACGGGACCCAGAAATGGGCGGG |
| | | AAGCCGCGCAGAAAGAATCCCCAAGAGGGCCTGTACAACGAGCTCCAAAAG |
| | | GATAAGATGGCAGAAGCCTATAGCGAGATTGGTATGAAAGGGGAACGCAGA |
| | | AGAGGCAAAGGCCACGACGGACTGTACCAGGGACTCAGCACCGCCACCAAG |
| | | GACACCTATGACGCTCTTCACATGCAGGCCCTGCCGCCTCGG |

139105

| | | |
|---|---|---|
| 139105-aa | 950 | MALPVTALLLPLALLLHAARPQVQLVESGGGLVQPGRSLRLSCAASGFTFD |
| Full CAR | | DYAMHWVRQAPGKGLEWVSGISWNSGSIGYADSVKGRFTISRDNAKNSLYL |
| | | QMNSLRAEDTALYYCSVHSFLAYWGQGTLVTVSSASGGGGSGGRASGGGGS |
| | | DIVMTQTPLSLPVTPGEPASISCRSSQSLLHSNGYNYLDWYLQKPGQSPQL |
| | | LIYLGSNRASGVPDRFSGSGSGTDFTLKISRVEAEDVGVYYCMQALQTPYT |
| | | FGQGTKVEIKTTTPAPRPPTPAPTIASQPLSLRPEACRPAAGGAVHTRGLD |
| | | FACDIYIWAPLAGTCGVLLLSLVITLYCKRGRKKLLYIFKQPFMRPVQTTQ |
| | | EEDGCSCRFPEEEEGGCELRVKFSRSADAPAYKQGQNQLYNELNLGRREEY |
| | | DVLDKRRGRDPEMGGKPRRKNPQEGLYNELQKDKMAEAYSEIGMKGERRRG |
| | | KGHDGLYQGLSTATKDTYDALHMQALPPR |
| 139105-nt | 965 | ATGGCCCTCCCTGTCACCGCCCTGCTGCTTCCGCTGGCTCTTCTGCTCCAC |
| Full CAR | | GCCGCTCGGCCCCAAGTGCAACTCGTCGAATCCGGTGGAGGTCTGGTCCAA |
| | | CCTGGTAGAAGCCTGAGACTGTCGTGTGCGGCCAGCGGATTCACCTTTGAT |
| | | GACTATGCTATGCACTGGGTGCGGCAGGCCCCAGGAAAGGGCCTGGAATGG |
| | | GTGTCGGGAATTAGCTGGAACTCCGGGTCCATTGGCTACGCCGACTCCGTG |
| | | AAGGGCCGCTTCACCATCTCCCGCGACAACGCAAAGAACTCCCTGTACTTG |
| | | CAAATGAACTCGCTCAGGGCTGAGGATACCGCGCTGTACTACTGCTCCGTG |
| | | CATTCCTTCCTGGCCTACTGGGGACAGGGAACTCTGGTCACCGTGTCGAGC |
| | | GCCTCCGGCGGCGGGGGCTCGGGTGGACGGGCCTCGGGCGGAGGGGGGTCC |
| | | GACATCGTGATGACCCAGACCCCGCTGAGCTTGCCCGTGACTCCCGGAGAG |
| | | CCTGCATCCATCTCCTGCCGGTCATCCCAGTCCCTTCTCCACTCCAACGGA |
| | | TACAACTACCTCGACTGGTACCTCCAGAAGCCGGGACAGAGCCCTCAGCTT |
| | | CTGATCTACCTGGGGTCAAATAGAGCCTCAGGAGTGCCGGATCGGTTCAGC |
| | | GGATCTGGTTCGGGAACTGATTTCACTCTGAAGATTTCCCGCGTGGAAGCC |
| | | GAGGACGTGGGCGTCTACTACTGTATGCAGGCGCTGCAGACCCCCTATACC |
| | | TTCGGCCAAGGGACGAAAGTGGAGATCAAGACCACTACCCCAGCACCGAGG |
| | | CCACCCACCCCGGCTCCTACCATCGCCTCCCAGCCTCTGTCCCTGCGTCCG |
| | | GAGGCATGTAGACCCGCAGCTGGTGGGGCCGTGCATACCCGGGGTCTTGAC |
| | | TTCGCCTGCGATATCTACATTTGGGCCCCTCTGGCTGGTACTTGCGGGGTC |
| | | CTGCTGCTTTCACTCGTGATCACTCTTTACTGTAAGCGCGGTCGGAAGAAG |
| | | CTGCTGTACATCTTTAAGCAACCCTTCATGAGGCCTGTGCAGACTACTCAA |
| | | GAGGAGGACGGCTGTTCATGCCGGTTCCCAGAGGAGGAGGAAGGCGGCTGC |
| | | GAACTGCGCGTGAAATTCAGCCGCAGCGCAGATGCTCCAGCCTACAAGCAG |
| | | GGGCAGAACCAGCTCTACAACGAACTCAATCTTGGTCGGAGAGAGGAGTAC |
| | | GACGTGCTGGACAAGCGGAGAGGACGGGACCCAGAAATGGGCGGGAAGCCG |
| | | CGCAGAAAGAATCCCCAAGAGGGCCTGTACAACGAGCTCCAAAAGGATAAG |
| | | ATGGCAGAAGCCTATAGCGAGATTGGTATGAAAGGGGAACGCAGAAGAGGC |
| | | AAAGGCCACGACGGACTGTACCAGGGACTCAGCACCGCCACCAAGGACACC |
| | | TATGACGCTCTTCACATGCAGGCCCTGCCGCCTCGG |

139111

| | | |
|---|---|---|
| 139111-aa | 951 | MALPVTALLLPLALLLHAARPEVQLLESGGGLVQPGGSLRLSCAVSGFALS |
| Full CAR | | NHGMSWVRRAPGKGLEWVSGIVYSGSTYYAASVKGRFTISRDNSRNTLYLQ |
| | | MNSLRPEDTAIYYCSAHGGESDVWGQGTTVTVSSASGGGGSGGRASGGGGS |
| | | DIVMTQTPLSLSVTPGQPASISCKSSQSLLRNDGKTPLYWYLQKAGQPPQL |
| | | LIYEVSNRFSGVPDRFSGSGSGTDFTLKISRVEAEDVGAYYCMQNIQFPSF |
| | | GGGTKLEIKTTTPAPRPPTPAPTIASQPLSLRPEACRPAAGGAVHTRGLDF |
| | | ACDIYIWAPLAGTCGVLLLSLVITLYCKRGRKKLLYIFKQPFMRPVQTTQE |
| | | EDGCSCRFPEEEEGGCELRVKFSRSADAPAYKQGQNQLYNELNLGRREEYD |
| | | VLDKRRGRDPEMGGKPRRKNPQEGLYNELQKDKMAEAYSEIGMKGERRRGK |
| | | GHDGLYQGLSTATKDTYDALHMQALPPR |
| 139111-nt | 966 | ATGGCCCTCCCTGTCACCGCCCTGCTGCTTCCGCTGGCTCTTCTGCTCCAC |
| Full CAR | | GCCGCTCGGCCCGAAGTGCAATTGTTGGAATCTGGAGGAGGACTTGTGCAG |
| | | CCTGGAGGATCACTGAGACTTTCGTGTGCGGTGTCAGGCTTCGCCCTGAGC |
| | | AACCACGGCATGAGCTGGGTGCGGAGAGCCCCGGGGAAGGGTCTGGAATGG |
| | | GTGTCCGGGATCGTCTACTCCGGTTCAACTTACTACGCCGCAAGCGTGAAG |
| | | GGTCGCTTCACCATTTCCCGCGATAACTCCCGGAACACCCTGTACCTCCAA |
| | | ATGAACTCCCTGCGGCCCGAGGACACCGCCATCTACTACTGTTCCGCGCAT |
| | | GGAGGAGAGTCCGATGTCTGGGGACAGGGCACTACCGTGACCGTGTCGAGC |
| | | GCCTCGGGGGGAGGAGGCTCCGGCGGTCGCGCCTCCGGGGGGGGTGGCAGC |
| | | GACATTGTGATGACGCAGACTCCACTCTCGCTGTCCGTGACCCCGGGACAG |
| | | CCCGCGTCCATCTCGTGCAAGAGCTCCCAGAGCCTGCTGAGGAACGACGGA |
| | | AAGACTCCTCTGTATTGGTACCTCCAGAAGGCTGGACAGCCCCCGCAACTG |
| | | CTCATCTACGAAGTGTCAAATCGCTTCTCCGGGGTGCCGGATCGGTTTTCC |
| | | GGCTCGGGATCGGGCACCGACTTCACCCTGAAAATCTCCAGGGTCGAGGCC |
| | | GAGGACGTGGGAGCCTACTACTGCATGCAAAACATCCAGTTCCCTTCCTTC |
| | | GGCGGCGGCACAAAGCTGGAGATTAAGACCACTACCCCAGCACCGAGGCCA |
| | | CCCACCCCGGCTCCTACCATCGCCTCCCAGCCTCTGTCCCTGCGTCCGGAG |
| | | GCATGTAGACCCGCAGCTGGTGGGGCCGTGCATACCCGGGGTCTTGACTTC |
| | | GCCTGCGATATCTACATTTGGGCCCCTCTGGCTGGTACTTGCGGGGTCCTG |
| | | CTGCTTTCACTCGTGATCACTCTTTACTGTAAGCGCGGTCGGAAGAAGCTG |
| | | CTGTACATCTTTAAGCAACCCTTCATGAGGCCTGTGCAGACTACTCAAGAG |
| | | GAGGACGGCTGTTCATGCCGGTTCCCAGAGGAGGAGGAAGGCGGCTGCGAA |
| | | CTGCGCGTGAAATTCAGCCGCAGCGCAGATGCTCCAGCCTACAAGCAGGGG |
| | | CAGAACCAGCTCTACAACGAACTCAATCTTGGTCGGAGAGAGGAGTACGAC |
| | | GTGCTGGACAAGCGGAGAGGACGGGACCCAGAAATGGGCGGGAAGCCGCGC |
| | | AGAAAGAATCCCCAAGAGGGCCTGTACAACGAGCTCCAAAAGGATAAGATG |
| | | GCAGAAGCCTATAGCGAGATTGGTATGAAAGGGGAACGCAGAAGAGGCAAA |
| | | GGCCACGACGGACTGTACCAGGGACTCAGCACCGCCACCAAGGACACCTAT |
| | | GACGCTCTTCACATGCAGGCCCTGCCGCCTCGG |

139100

| | | |
|---|---|---|
| 139100-aa | 952 | MALPVTALLLPLALLLHAARPQVQLVQSGAEVRKTGASVKVSCKASGYIFD |
| Full CAR | | NFGINWVRQAPGQGLEWMGWINPKNNNTNYAQKFQGRVTITADESTNTAYM |
| | | EVSSLRSEDTAVYYCARGPYYYQSYMDVWGQGTMVTVSSASGGGGSGGRAS |
| | | GGGGSDIVMTQTPLSLPVTPGEPASISCRSSQSLLHSNGYNYLNWYLQKPG |
| | | QSPQLLIYLGSKRASGVPDRFSGSGSGTDFTLHITRVGAEDVGVYYCMQAL |
| | | QTPYTFGQGTKLEIKTTTPAPRPPTPAPTIASQPLSLRPEACRPAAGGAVH |
| | | TRGLDFACDIYIWAPLAGTCGVLLLSLVITLYCKRGRKKLLYIFKQPFMRP |
| | | VQTTQEEDGCSCRFPEEEEGGCELRVKFSRSADAPAYKQGQNQLYNELNLG |
| | | RREEYDVLDKRRGRDPEMGGKPRRKNPQEGLYNELQKDKMAEAYSEIGMKG |
| | | ERRRGKGHDGLYQGLSTATKDTYDALHMQALPPR |
| 139100-nt | 967 | ATGGCCCTCCCTGTCACCGCCCTGCTGCTTCCGCTGGCTCTTCTGCTCCAC |
| Full CAR | | GCCGCTCGGCCCCAAGTCCAACTCGTCCAGTCCGGCGCAGAAGTCAGAAAA |
| | | ACCGGTGCTAGCGTGAAAGTGTCCTGCAAGGCCTCCGGCTACATTTTCGAT |
| | | AACTTCGGAATCAACTGGGTCAGACAGGCCCCGGGCCAGGGGCTGGAATGG |
| | | ATGGGATGGATCAACCCCAAGAACAACAACACCAACTACGCACAGAAGTTC |
| | | CAGGGCCGCGTGACTATCACCGCCGATGAATCGACCAATACCGCCTACATG |
| | | GAGGTGTCCTCCCTGCGGTCGGAGGACACTGCCGTGTATTACTGCGCGAGG |
| | | GGCCCATACTACTACCAAAGCTACATGGACGTCTGGGGACAGGGAACCATG |
| | | GTGACCGTGTCATCCGCCTCCGGTGGTGGAGGCTCCGGGGGGCGGGCTTCA |
| | | GGAGGCGGAGGAAGCGATATTGTGATGACCCAGACTCCGCTTAGCCTGCCC |
| | | GTGACTCCTGGAGAACCGGCCTCCATTTCCTGCCGGTCCTCGCAATCACTC |
| | | CTGCATTCCAACGGTTACAACTACCTGAATTGGTACCTCCAGAAGCCTGGC |
| | | CAGTCGCCCCAGTTGCTGATCTATCTGGGCTCGAAGCGCGCCTCCGGGGTG |
| | | CCTGACCGGTTTAGCGGATCTGGGAGCGGCACGGACTTCACTCTCCACATC |
| | | ACCCGCGTGGGAGCGGAGGACGTGGGAGTGTACTACTGTATGCAGGCGCTG |
| | | CAGACTCCGTACACATTCGGACAGGGCACCAAGCTGGAGATCAAGACCACT |
| | | ACCCCAGCACCGAGGCCACCCACCCCGGCTCCTACCATCGCCTCCCAGCCT |
| | | CTGTCCCTGCGTCCGGAGGCATGTAGACCCGCAGCTGGTGGGGCCGTGCAT |
| | | ACCCGGGGTCTTGACTTCGCCTGCGATATCTACATTTGGGCCCCTCTGGCT |
| | | GGTACTTGCGGGGTCCTGCTGCTTTCACTCGTGATCACTCTTTACTGTAAG |
| | | CGCGGTCGGAAGAAGCTGCTGTACATCTTTAAGCAACCCTTCATGAGGCCT |
| | | GTGCAGACTACTCAAGAGGAGGACGGCTGTTCATGCCGGTTCCCAGAGGAG |
| | | GAGGAAGGCGGCTGCGAACTGCGCGTGAAATTCAGCCGCAGCGCAGATGCT |
| | | CCAGCCTACAAGCAGGGGCAGAACCAGCTCTACAACGAACTCAATCTTGGT |
| | | CGGAGAGAGGAGTACGACGTGCTGGACAAGCGGAGAGGACGGGACCCAGAA |
| | | ATGGGCGGGAAGCCGCGCAGAAAGAATCCCCAAGAGGGCCTGTACAACGAG |
| | | CTCCAAAAGGATAAGATGGCAGAAGCCTATAGCGAGATTGGTATGAAAGGG |
| | | GAACGCAGAAGAGGCAAAGGCCACGACGGACTGTACCAGGGACTCAGCACC |
| | | GCCACCAAGGACACCTATGACGCTCTTCACATGCAGGCCCTGCCGCCTCGG |

139101

| | | |
|---|---|---|
| 139101-aa | 953 | MALPVTALLLPLALLLHAARPQVQLQESGGGLVQPGGSLRLSCAASGFTFS |
| Full CAR | | SDAMTWVRQAPGKGLEWVSVISGSGGTTYYADSVKGRFTISRDNSKNTLYL |
| | | QMNSLRAEDTAVYYCAKLDSSGYYYARGPRYWGQGTLVTVSSASGGGGSGG |
| | | RASGGGGSDIQLTQSPSSLSASVGDRVTITCRASQSISSYLNWYQQKPGKA |
| | | PKLLIYGASTLASGVPARFSGSGSGTHFTLTINSLQSEDSATYYCQQSYKR |
| | | ASFGQGTKVEIKTTTPAPRPPTPAPTIASQPLSLRPEACRPAAGGAVHTRG |
| | | LDFACDIYIWAPLAGTCGVLLLSLVITLYCKRGRKKLLYIFKQPFMRPVQT |
| | | TQEEDGCSCRFPEEEEGGCELRVKFSRSADAPAYKQGQNQLYNELNLGRRE |
| | | EYDVLDKRRGRDPEMGGKPRRKNPQEGLYNELQKDKMAEAYSEIGMKGERR |
| | | RGKGHDGLYQGLSTATKDTYDALHMQALPPR |
| 139101-nt | 968 | ATGGCCCTCCCTGTCACCGCCCTGCTGCTTCCGCTGGCTCTTCTGCTCCAC |
| Full CAR | | GCCGCTCGGCCCCAAGTGCAACTTCAAGAATCAGGCGGAGGACTCGTGCAG |
| | | CCCGGAGGATCATTGCGGCTCTCGTGCGCCGCCTCGGGCTTCACCTTCTCG |
| | | AGCGACGCCATGACCTGGGTCCGCCAGGCCCCGGGGAAGGGGCTGGAATGG |
| | | GTGTCTGTGATTTCCGGCTCCGGGGGAACTACGTACTACGCCGATTCCGTG |
| | | AAAGGTCGCTTCACTATCTCCCGGGACAACAGCAAGAACACCCTTTATCTG |
| | | CAAATGAATTCCCTCCGCGCCGAGGACACCGCCGTGTACTACTGCGCCAAG |
| | | CTGGACTCCTCGGGCTACTACTATGCCCGGGGTCCGAGATACTGGGGACAG |
| | | GGAACCCTCGTGACCGTGTCCTCCGCGTCCGGCGGAGGAGGGTCGGGAGGG |
| | | CGGGCCTCCGGCGGCGGCGGTTCGGACATCCAGCTGACCCAGTCCCCATCC |
| | | TCACTGAGCGCAAGCGTGGGCGACAGAGTCACCATTACATGCAGGGCGTCC |
| | | CAGAGCATCAGCTCCTACCTGAACTGGTACCAACAGAAGCCTGGAAAGGCT |
| | | CCTAAGCTGTTGATCTACGGGGCTTCGACCCTGGCATCCGGGGTGCCCGCG |
| | | AGGTTTAGCGGAAGCGGTAGCGGCACTCACTTCACTCTGACCATTAACAGC |
| | | CTCCAGTCCGAGGATTCAGCCACTTACTACTGTCAGCAGTCCTACAAGCGG |
| | | GCCAGCTTCGGACAGGGCACTAAGGTCGAGATCAAGACCACTACCCCAGCA |
| | | CCGAGGCCACCCACCCCGGCTCCTACCATCGCCTCCCAGCCTCTGTCCCTG |
| | | CGTCCGGAGGCATGTAGACCCGCAGCTGGTGGGGCCGTGCATACCCGGGGT |
| | | CTTGACTTCGCCTGCGATATCTACATTTGGGCCCCTCTGGCTGGTACTTGC |
| | | GGGGTCCTGCTGCTTTCACTCGTGATCACTCTTTACTGTAAGCGCGGTCGG |
| | | AAGAAGCTGCTGTACATCTTTAAGCAACCCTTCATGAGGCCTGTGCAGACT |
| | | ACTCAAGAGGAGGACGGCTGTTCATGCCGGTTCCCAGAGGAGGAGGAAGGC |
| | | GGCTGCGAACTGCGCGTGAAATTCAGCCGCAGCGCAGATGCTCCAGCCTAC |
| | | AAGCAGGGGCAGAACCAGCTCTACAACGAACTCAATCTTGGTCGGAGAGAG |
| | | GAGTACGACGTGCTGGACAAGCGGAGAGGACGGGACCCAGAAATGGGCGGG |
| | | AAGCCGCGCAGAAAGAATCCCCAAGAGGGCCTGTACAACGAGCTCCAAAAG |
| | | GATAAGATGGCAGAAGCCTATAGCGAGATTGGTATGAAAGGGGAACGCAGA |
| | | AGAGGCAAAGGCCACGACGGACTGTACCAGGGACTCAGCACCGCCACCAAG |
| | | GACACCTATGACGCTCTTCACATGCAGGCCCTGCCGCCTCGG |

139102

| | | |
|---|---|---|
| 139102-aa | 954 | MALPVTALLLPLALLLHAARPQVQLVQSGAEVKKPGASVKVSCKASGYTFS |
| Full CAR | | NYGITWVRQAPGQGLEWMGWISAYNGNTNYAQKFQGRVTMTRNTSISTAYM |
| | | ELSSLRSEDTAVYYCARGPYYYYMDVWGKGTMVTVSSASGGGGSGGRASGG |
| | | GGSEIVMTQSPLSLPVTPGEPASISCRSSQSLLYSNGYNYVDWYLQKPGQS |
| | | PQLLIYLGSNRASGVPDRFSGSGSGTDFKLQISRVEAEDVGIYYCMQGRQF |
| | | PYSFGQGTKVEIKTTTPAPRPPTPAPTIASQPLSLRPEACRPAAGGAVHTR |
| | | GLDFACDIYIWAPLAGTCGVLLLSLVITLYCKRGRKKLLYIFKQPFMRPVQ |
| | | TTQEEDGCSCRFPEEEEGGCELRVKFSRSADAPAYKQGQNQLYNELNLGRR |
| | | EEYDVLDKRRGRDPEMGGKPRRKNPQEGLYNELQKDKMAEAYSEIGMKGER |
| | | RRGKGHDGLYQGLSTATKDTYDALHMQALPPR |
| 139102-nt | 969 | ATGGCCCTCCCTGTCACCGCCCTGCTGCTTCCGCTGGCTCTTCTGCTCCAC |
| Full CAR | | GCCGCTCGGCCCCAAGTCCAACTGGTCCAGAGCGGTGCAGAAGTGAAGAAG |
| | | CCCGGAGCGAGCGTGAAAGTGTCCTGCAAGGCTTCCGGGTACACCTTCTCC |
| | | AACTACGGCATCACTTGGGTGCGCCAGGCCCCGGGACAGGGCCTGGAATGG |
| | | ATGGGGTGGATTTCCGCGTACAACGGCAATACGAACTACGCTCAGAAGTTC |
| | | CAGGGTAGAGTGACCATGACTAGGAACACCTCCATTTCCACCGCCTACATG |
| | | GAACTGTCCTCCCTGCGGAGCGAGGACACCGCCGTGTACTATTGCGCCCGG |
| | | GGACCATACTACTACTACATGGATGTCTGGGGGAAGGGGACTATGGTCACC |
| | | GTGTCATCCGCCTCGGGAGGCGGCGGATCAGGAGGACGCGCCTCTGGTGGT |
| | | GGAGGATCGGAGATCGTGATGACCCAGAGCCCTCTCTCCTTGCCCGTGACT |
| | | CCTGGGGAGCCCGCATCCATTTCATGCCGGAGCTCCCAGTCACTTCTCTAC |
| | | TCCAACGGCTATAACTACGTGGATTGGTACCTCCAAAAGCCGGGCCAGAGC |
| | | CCGCAGCTGCTGATCTACCTGGGCTCGAACAGGGCCAGCGGAGTGCCTGAC |
| | | CGGTTCTCCGGGTCGGGAAGCGGGACCGACTTCAAGCTGCAAATCTCGAGA |
| | | GTGGAGGCCGAGGACGTGGGAATCTACTACTGTATGCAGGGCCGCCAGTTT |
| | | CCGTACTCGTTCGGACAGGGCACCAAAGTGGAAATCAAGACCACTACCCCA |
| | | GCACCGAGGCCACCCACCCCGGCTCCTACCATCGCCTCCCAGCCTCTGTCC |
| | | CTGCGTCCGGAGGCATGTAGACCCGCAGCTGGTGGGGCCGTGCATACCCGG |
| | | GGTCTTGACTTCGCCTGCGATATCTACATTTGGGCCCCTCTGGCTGGTACT |
| | | TGCGGGGTCCTGCTGCTTTCACTCGTGATCACTCTTTACTGTAAGCGCGGT |
| | | CGGAAGAAGCTGCTGTACATCTTTAAGCAACCCTTCATGAGGCCTGTGCAG |
| | | ACTACTCAAGAGGAGGACGGCTGTTCATGCCGGTTCCCAGAGGAGGAGGAA |
| | | GGCGGCTGCGAACTGCGCGTGAAATTCAGCCGCAGCGCAGATGCTCCAGCC |
| | | TACAAGCAGGGGCAGAACCAGCTCTACAACGAACTCAATCTTGGTCGGAGA |
| | | GAGGAGTACGACGTGCTGGACAAGCGGAGAGGACGGGACCCAGAAATGGGC |
| | | GGGAAGCCGCGCAGAAAGAATCCCCAAGAGGGCCTGTACAACGAGCTCCAA |
| | | AAGGATAAGATGGCAGAAGCCTATAGCGAGATTGGTATGAAAGGGGAACGC |
| | | AGAAGAGGCAAAGGCCACGACGGACTGTACCAGGGACTCAGCACCGCCACC |
| | | AAGGACACCTATGACGCTCTTCACATGCAGGCCCTGCCGCCTCGG |

139104

| | | |
|---|---|---|
| 139104-aa | 955 | MALPVTALLLPLALLLHAARPEVQLLETGGGLVQPGGSLRLSCAVSGFALS |
| Full CAR | | NHGMSWVRRAPGKGLEWVSGIVYSGSTYYAASVKGRFTISRDNSRNTLYLQ |
| | | MNSLRPEDTAIYYCSAHGGESDVWGQGTTVTVSSASGGGGSGGRASGGGGS |
| | | EIVLTQSPATLSVSPGESATLSCRASQSVSSNLAWYQQKPGQAPRLLIYGA |
| | | STRASGIPDRFSGSGSGTDFTLTISSLQAEDVAVYYCQQYGSSLTFGGGTK |
| | | VEIKTTTPAPRPPTPAPTIASQPLSLRPEACRPAAGGAVHTRGLDFACDIY |
| | | IWAPLAGTCGVLLLSLVITLYCKRGRKKLLYIFKQPFMRPVQTTQEEDGCS |
| | | CRFPEEEEGGCELRVKFSRSADAPAYKQGQNQLYNELNLGRREEYDVLDKR |
| | | RGRDPEMGGKPRRKNPQEGLYNELQKDKMAEAYSEIGMKGERRRGKGHDGL |
| | | YQGLSTATKDTYDALHMQALPPR |
| 139104-nt | 970 | ATGGCCCTCCCTGTCACCGCCCTGCTGCTTCCGCTGGCTCTTCTGCTCCAC |
| Full CAR | | GCCGCTCGGCCCGAAGTGCAATTGCTCGAAACTGGAGGAGGTCTGGTGCAA |
| | | CCTGGAGGATCACTTCGCCTGTCCTGCGCCGTGTCGGGCTTTGCCCTGTCC |
| | | AACCATGGAATGAGCTGGGTCCGCCGCGCGCCGGGGAAGGGCCTCGAATGG |
| | | GTGTCCGGCATCGTCTACTCCGGCTCCACCTACTACGCCGCGTCCGTGAAG |
| | | GGCCGGTTCACGATTTCACGGGACAACTCGCGGAACACCCTGTACCTCCAA |
| | | ATGAATTCCCTTCGGCCGGAGGATACTGCCATCTACTACTGCTCCGCCCAC |
| | | GGTGGCGAATCCGACGTCTGGGGCCAGGGAACCACCGTGACCGTGTCCAGC |
| | | GCGTCCGGGGGAGGAGGAAGCGGGGGTAGAGCATCGGGTGGAGGCGGATCA |
| | | GAGATCGTGCTGACCCAGTCCCCCGCCACCTTGAGCGTGTCACCAGGAGAG |
| | | TCCGCCACCCTGTCATGCCGCGCCAGCCAGTCCGTGTCCTCCAACCTGGCT |
| | | TGGTACCAGCAGAAGCCGGGGCAGGCCCCTAGACTCCTGATCTATGGGGCG |
| | | TCGACCCGGGCATCTGGAATTCCCGATAGGTTCAGCGGATCGGGCTCGGGC |
| | | ACTGACTTCACTCTGACCATCTCCTCGCTGCAAGCCGAGGACGTGGCTGTG |
| | | TACTACTGTCAGCAGTACGGAAGCTCCCTGACTTTCGGTGGCGGGACCAAA |
| | | GTCGAGATTAAGACCACTACCCCAGCACCGAGGCCACCCACCCCGGCTCCT |
| | | ACCATCGCCTCCCAGCCTCTGTCCCTGCGTCCGGAGGCATGTAGACCCGCA |
| | | GCTGGTGGGGCCGTGCATACCCGGGGTCTTGACTTCGCCTGCGATATCTAC |
| | | ATTTGGGCCCCTCTGGCTGGTACTTGCGGGGTCCTGCTGCTTTCACTCGTG |
| | | ATCACTCTTTACTGTAAGCGCGGTCGGAAGAAGCTGCTGTACATCTTTAAG |
| | | CAACCCTTCATGAGGCCTGTGCAGACTACTCAAGAGGAGGACGGCTGTTCA |
| | | TGCCGGTTCCCAGAGGAGGAGGAAGGCGGCTGCGAACTGCGCGTGAAATTC |
| | | AGCCGCAGCGCAGATGCTCCAGCCTACAAGCAGGGGCAGAACCAGCTCTAC |
| | | AACGAACTCAATCTTGGTCGGAGAGAGGAGTACGACGTGCTGGACAAGCGG |
| | | AGAGGACGGGACCCAGAAATGGGCGGGAAGCCGCGCAGAAAGAATCCCCAA |
| | | GAGGGCCTGTACAACGAGCTCCAAAAGGATAAGATGGCAGAAGCCTATAGC |
| | | GAGATTGGTATGAAAGGGGAACGCAGAAGAGGCAAAGGCCACGACGGACTG |
| | | TACCAGGGACTCAGCACCGCCACCAAGGACACCTATGACGCTCTTCACATG |
| | | CAGGCCCTGCCGCCTCGG |

139106

| | | |
|---|---|---|
| 139106-aa | 956 | MALPVTALLLPLALLLHAARPEVQLVETGGGLVQPGGSLRLSCAVSGFALS |
| Full CAR | | NHGMSWVRRAPGKGLEWVSGIVYSGSTYYAASVKGRFTISRDNSRNTLYLQ |
| | | MNSLRPEDTAIYYCSAHGGESDVWGQGTTVTVSSASGGGGSGGRASGGGGS |
| | | EIVMTQSPATLSVSPGERATLSCRASQSVSSKLAWYQQKPGQAPRLLMYGA |
| | | SIRATGIPDRFSGSGSGTEFTLTISSLEPEDFAVYYCQQYGSSSWTFGQGT |
| | | KVEIKTTTPAPRPPTPAPTIASQPLSLRPEACRPAAGGAVHTRGLDFACDI |
| | | YIWAPLAGTCGVLLLSLVITLYCKRGRKKLLYIFKQPFMRPVQTTQEEDGC |
| | | SCRFPEEEEGGCELRVKFSRSADAPAYKQGQNQLYNELNLGRREEYDVLDK |
| | | RRGRDPEMGGKPRRKNPQEGLYNELQKDKMAEAYSEIGMKGERRRGKGHDG |
| | | LYQGLSTATKDTYDALHMQALPPR |
| 139106-nt | 971 | ATGGCCCTCCCTGTCACCGCCCTGCTGCTTCCGCTGGCTCTTCTGCTCCAC |
| Full CAR | | GCCGCTCGGCCCGAAGTGCAATTGGTGGAAACTGGAGGAGGACTTGTGCAA |
| | | CCTGGAGGATCATTGAGACTGAGCTGCGCAGTGTCGGGATTCGCCCTGAGC |
| | | AACCATGGAATGTCCTGGGTCAGAAGGGCCCCTGGAAAAGGCCTCGAATGG |
| | | GTGTCAGGGATCGTGTACTCCGGTTCCACTTACTACGCCGCCTCCGTGAAG |
| | | GGGCGCTTCACTATCTCACGGGATAACTCCCGCAATACCCTGTACCTCCAA |
| | | ATGAACAGCCTGCGGCCGGAGGATACCGCCATCTACTACTGTTCCGCCCAC |
| | | GGTGGAGAGTCTGACGTCTGGGGCCAGGGAACTACCGTGACCGTGTCCTCC |
| | | GCGTCCGGCGGTGGAGGGAGCGGCGGCCGCGCCAGCGGCGGCGGAGGCTCC |
| | | GAGATCGTGATGACCCAGAGCCCCGCTACTCTGTCGGTGTCGCCCGGAGAA |
| | | AGGGCGACCCTGTCCTGCCGGGCGTCGCAGTCCGTGAGCAGCAAGCTGGCT |
| | | TGGTACCAGCAGAAGCCGGGCCAGGCACCACGCCTGCTTATGTACGGTGCC |
| | | TCCATTCGGGCCACCGGAATCCCGGACCGGTTCTCGGGGTCGGGGTCCGGT |
| | | ACCGAGTTCACACTGACCATTTCCTCGCTCGAGCCCGAGGACTTTGCCGTC |
| | | TATTACTGCCAGCAGTACGGCTCCTCCTCATGGACGTTCGGCCAGGGGACC |
| | | AAGGTCGAAATCAAGACCACTACCCCAGCACCGAGGCCACCCACCCCGGCT |
| | | CCTACCATCGCCTCCCAGCCTCTGTCCCTGCGTCCGGAGGCATGTAGACCC |
| | | GCAGCTGGTGGGGCCGTGCATACCCGGGGTCTTGACTTCGCCTGCGATATC |
| | | TACATTTGGGCCCCTCTGGCTGGTACTTGCGGGGTCCTGCTGCTTTCACTC |
| | | GTGATCACTCTTTACTGTAAGCGCGGTCGGAAGAAGCTGCTGTACATCTTT |
| | | AAGCAACCCTTCATGAGGCCTGTGCAGACTACTCAAGAGGAGGACGGCTGT |
| | | TCATGCCGGTTCCCAGAGGAGGAGGAAGGCGGCTGCGAACTGCGCGTGAAA |
| | | TTCAGCCGCAGCGCAGATGCTCCAGCCTACAAGCAGGGGCAGAACCAGCTC |
| | | TACAACGAACTCAATCTTGGTCGGAGAGAGGAGTACGACGTGCTGGACAAG |
| | | CGGAGAGGACGGGACCCAGAAATGGGCGGGAAGCCGCGCAGAAAGAATCCC |
| | | CAAGAGGGCCTGTACAACGAGCTCCAAAAGGATAAGATGGCAGAAGCCTAT |
| | | AGCGAGATTGGTATGAAAGGGGAACGCAGAAGAGGCAAAGGCCACGACGGA |
| | | CTGTACCAGGGACTCAGCACCGCCACCAAGGACACCTATGACGCTCTTCAC |
| | | ATGCAGGCCCTGCCGCCTCGG |

139107

| | | |
|---|---|---|
| 139107-aa | 957 | MALPVTALLLPLALLLHAARPEVQLVETGGGVVQPGGSLRLSCAVSGFALS |
| Full CAR | | NHGMSWVRRAPGKGLEWVSGIVYSGSTYYAASVKGRFTISRDNSRNTLYLQ |
| | | MNSLRPEDTAIYYCSAHGGESDVWGQGTTVTVSSASGGGGSGGRASGGGGS |
| | | EIVLTQSPGTLSLSPGERATLSCRASQSVGSTNLAWYQQKPGQAPRLLIYD |
| | | ASNRATGIPDRFSGGGSGTDFTLTISRLEPEDFAVYYCQQYGSSPPWTFGQ |
| | | GTKVEIKTTTPAPRPPTPAPTIASQPLSLRPEACRPAAGGAVHTRGLDFAC |
| | | DIYIWAPLAGTCGVLLLSLVITLYCKRGRKKLLYIFKQPFMRPVQTTQEED |
| | | GCSCRFPEEEEGGCELRVKFSRSADAPAYKQGQNQLYNELNLGRREEYDVL |
| | | DKRRGRDPEMGGKPRRKNPQEGLYNELQKDKMAEAYSEIGMKGERRRGKGH |
| | | DGLYQGLSTATKDTYDALHMQALPPR |
| 139107-nt | 972 | ATGGCCCTCCCTGTCACCGCCCTGCTGCTTCCGCTGGCTCTTCTGCTCCAC |
| Full CAR | | GCCGCTCGGCCCGAAGTGCAATTGGTGGAGACTGGAGGAGGAGTGGTGCAA |
| | | CCTGGAGGAAGCCTGAGACTGTCATGCGCGGTGTCGGGCTTCGCCCTCTCC |
| | | AACCACGGAATGTCCTGGGTCCGCCGGGCCCCTGGGAAAGGACTTGAATGG |
| | | GTGTCCGGCATCGTGTACTCGGGTTCCACCTACTACGCGGCCTCAGTGAAG |
| | | GGCCGGTTTACTATTAGCCGCGACAACTCCAGAAACACACTGTACCTCCAA |
| | | ATGAACTCGCTGCGGCCGGAAGATACCGCTATCTACTACTGCTCCGCCCAT |
| | | GGGGGAGAGTCGGACGTCTGGGGACAGGGCACCACTGTCACTGTGTCCAGC |
| | | GCTTCCGGCGGTGGTGGAAGCGGGGGACGGGCCTCAGGAGGCGGTGGCAGC |
| | | GAGATTGTGCTGACCCAGTCCCCCGGGACCCTGAGCCTGTCCCCGGGAGAA |
| | | AGGGCCACCCTCTCCTGTCGGGCATCCCAGTCCGTGGGGTCTACTAACCTT |
| | | GCATGGTACCAGCAGAAGCCCGGCCAGGCCCCTCGCCTGCTGATCTACGAC |
| | | GCGTCCAATAGAGCCACCGGCATCCCGGATCGCTTCAGCGGAGGCGGATCG |
| | | GGCACCGACTTCACCCTCACCATTTCAAGGCTGGAACCGGAGGACTTCGCC |
| | | GTGTACTACTGCCAGCAGTATGGTTCGTCCCCACCCTGGACGTTCGGCCAG |
| | | GGGACTAAGGTCGAGATCAAGACCACTACCCCAGCACCGAGGCCACCCACC |
| | | CCGGCTCCTACCATCGCCTCCCAGCCTCTGTCCCTGCGTCCGGAGGCATGT |
| | | AGACCCGCAGCTGGTGGGGCCGTGCATACCCGGGGTCTTGACTTCGCCTGC |
| | | GATATCTACATTTGGGCCCCTCTGGCTGGTACTTGCGGGGTCCTGCTGCTT |
| | | TCACTCGTGATCACTCTTTACTGTAAGCGCGGTCGGAAGAAGCTGCTGTAC |
| | | ATCTTTAAGCAACCCTTCATGAGGCCTGTGCAGACTACTCAAGAGGAGGAC |
| | | GGCTGTTCATGCCGGTTCCCAGAGGAGGAGGAAGGCGGCTGCGAACTGCGC |
| | | GTGAAATTCAGCCGCAGCGCAGATGCTCCAGCCTACAAGCAGGGGCAGAAC |
| | | CAGCTCTACAACGAACTCAATCTTGGTCGGAGAGAGGAGTACGACGTGCTG |
| | | GACAAGCGGAGAGGACGGGACCCAGAAATGGGCGGGAAGCCGCGCAGAAAG |
| | | AATCCCCAAGAGGGCCTGTACAACGAGCTCCAAAAGGATAAGATGGCAGAA |
| | | GCCTATAGCGAGATTGGTATGAAAGGGGAACGCAGAAGAGGCAAAGGCCAC |
| | | GACGGACTGTACCAGGGACTCAGCACCGCCACCAAGGACACCTATGACGCT |
| | | CTTCACATGCAGGCCCTGCCGCCTCGG |

139108

| | | |
|---|---|---|
| 139108-aa | 958 | MALPVTALLLPLALLLHAARPQVQLVESGGGLVKPGGSLRLSCAASGFTFS |
| Full CAR | | DYYMSWIRQAPGKGLEWVSYISSSGSTIYYADSVKGRFTISRDNAKNSLYL |
| | | QMNSLRAEDTAVYYCARESGDGMDVWGQGTTVTVSSASGGGGSGGRASGGG |
| | | GSDIQMTQSPSSLSASVGDRVTITCRASQSISSYLNWYQQKPGKAPKLLIY |
| | | AASSLQSGVPSRFSGSGSGTDFTLTISSLQPEDFATYYCQQSYTLAFGQGT |
| | | KVDIKTTTPAPRPPTPAPTIASQPLSLRPEACRPAAGGAVHTRGLDFACDI |
| | | YIWAPLAGTCGVLLLSLVITLYCKRGRKKLLYIFKQPFMRPVQTTQEEDGC |
| | | SCRFPEEEEGGCELRVKFSRSADAPAYKQGQNQLYNELNLGRREEYDVLDK |
| | | RRGRDPEMGGKPRRKNPQEGLYNELQKDKMAEAYSEIGMKGERRRGKGHDG |
| | | LYQGLSTATKDTYDALHMQALPPR |
| 139108-nt | 973 | ATGGCCCTCCCTGTCACCGCCCTGCTGCTTCCGCTGGCTCTTCTGCTCCAC |
| Full CAR | | GCCGCTCGGCCCCAAGTGCAACTCGTGGAATCTGGTGGAGGACTCGTGAAA |
| | | CCTGGAGGATCATTGAGACTGTCATGCGCGGCCTCGGGATTCACGTTCTCC |
| | | GATTACTACATGAGCTGGATTCGCCAGGCTCCGGGGAAGGGACTGGAATGG |
| | | GTGTCCTACATTTCCTCATCCGGCTCCACCATCTACTACGCGGACTCCGTG |
| | | AAGGGGAGATTCACCATTAGCCGCGATAACGCCAAGAACAGCCTGTACCTT |
| | | CAGATGAACTCCCTGCGGGCTGAAGATACTGCCGTCTACTACTGCGCAAGG |
| | | GAGAGCGGAGATGGGATGGACGTCTGGGGACAGGGTACCACTGTGACCGTG |
| | | TCGTCGGCCTCCGGCGGAGGGGGTTCGGGTGGAAGGGCCAGCGGCGGCGGA |
| | | GGCAGCGACATCCAGATGACCCAGTCCCCCTCATCGCTGTCCGCCTCCGTG |
| | | GGCGACCGCGTCACCATCACATGCCGGGCCTCACAGTCGATCTCCTCCTAC |
| | | CTCAATTGGTATCAGCAGAAGCCCGGAAAGGCCCCTAAGCTTCTGATCTAC |
| | | GCAGCGTCCTCCCTGCAATCCGGGGTCCCATCTCGGTTCTCCGGCTCGGGC |
| | | AGCGGTACCGACTTCACTCTGACCATCTCGAGCCTGCAGCCGGAGGACTTC |
| | | GCCACTTACTACTGTCAGCAAAGCTACACCCTCGCGTTTGGCCAGGGCACC |
| | | AAAGTGGACATCAAGACCACTACCCCAGCACCGAGGCCACCCACCCCGGCT |
| | | CCTACCATCGCCTCCCAGCCTCTGTCCCTGCGTCCGGAGGCATGTAGACCC |
| | | GCAGCTGGTGGGGCCGTGCATACCCGGGGTCTTGACTTCGCCTGCGATATC |
| | | TACATTTGGGCCCCTCTGGCTGGTACTTGCGGGGTCCTGCTGCTTTCACTC |
| | | GTGATCACTCTTTACTGTAAGCGCGGTCGGAAGAAGCTGCTGTACATCTTT |
| | | AAGCAACCCTTCATGAGGCCTGTGCAGACTACTCAAGAGGAGGACGGCTGT |
| | | TCATGCCGGTTCCCAGAGGAGGAGGAAGGCGGCTGCGAACTGCGCGTGAAA |
| | | TTCAGCCGCAGCGCAGATGCTCCAGCCTACAAGCAGGGGCAGAACCAGCTC |
| | | TACAACGAACTCAATCTTGGTCGGAGAGAGGAGTACGACGTGCTGGACAAG |
| | | CGGAGAGGACGGGACCCAGAAATGGGCGGGAAGCCGCGCAGAAAGAATCCC |
| | | CAAGAGGGCCTGTACAACGAGCTCCAAAAGGATAAGATGGCAGAAGCCTAT |
| | | AGCGAGATTGGTATGAAAGGGGAACGCAGAAGAGGCAAAGGCCACGACGGA |
| | | CTGTACCAGGGACTCAGCACCGCCACCAAGGACACCTATGACGCTCTTCAC |
| | | ATGCAGGCCCTGCCGCCTCGG |

139110

| | | |
|---|---|---|
| 139110-aa | 960 | MALPVTALLLPLALLLHAARPQVQLVQSGGGLVKPGGSLRLSCAASGFTFS |
| Full CAR | | DYYMSWIRQAPGKGLEWVSYISSSGNTIYYADSVKGRFTISRDNAKNSLYL |
| | | QMNSLRAEDTAVYYCARSTMVREDYWGQGTLVTVSSASGGGGSGGRASGGG |
| | | GSDIVLTQSPLSLPVTLGQPASISCKSSESLVHNSGKTYLNWFHQRPGQSP |
| | | RRLIYEVSNRDSGVPDRFTGSGSGTDFTLKISRVEAEDVGVYYCMQGTHWP |
| | | GTFGQGTKLEIKTTTPAPRPPTPAPTIASQPLSLRPEACRPAAGGAVHTRG |
| | | LDFACDIYIWAPLAGTCGVLLLSLVITLYCKRGRKKLLYIFKQPFMRPVQT |
| | | TQEEDGCSCRFPEEEEGGCELRVKFSRSADAPAYKQGQNQLYNELNLGRRE |
| | | EYDVLDKRRGRDPEMGGKPRRKNPQEGLYNELQKDKMAEAYSEIGMKGERR |
| | | RGKGHDGLYQGLSTATKDTYDALHMQALPPR |
| 139110-nt | 975 | ATGGCCCTCCCTGTCACCGCCCTGCTGCTTCCGCTGGCTCTTCTGCTCCAC |
| Full CAR | | GCCGCTCGGCCCCAAGTGCAACTGGTGCAAAGCGGAGGAGGATTGGTCAAA |
| | | CCCGGAGGAAGCCTGAGACTGTCATGCGCGGCCTCTGGATTCACCTTCTCC |
| | | GATTACTACATGTCATGGATCAGACAGGCCCCGGGGAAGGGCCTCGAATGG |
| | | GTGTCCTACATCTCGTCCTCCGGGAACACCATCTACTACGCCGACAGCGTG |
| | | AAGGGCCGCTTTACCATTTCCCGCGACAACGCAAAGAACTCGCTGTACCTT |
| | | CAGATGAATTCCCTGCGGGCTGAAGATACCGCGGTGTACTATTGCGCCCGG |
| | | TCCACTATGGTCCGGGAGGACTACTGGGGACAGGGCACACTCGTGACCGTG |
| | | TCCAGCGCGAGCGGGGGTGGAGGCAGCGGTGGACGCGCCTCCGGCGGCGGC |
| | | GGTTCAGACATCGTGCTGACTCAGTCGCCCCTGTCGCTGCCGGTCACCCTG |
| | | GGCCAACCGGCCTCAATTAGCTGCAAGTCCTCGGAGAGCCTGGTGCACAAC |
| | | TCAGGAAAGACTTACCTGAACTGGTTCCATCAGCGGCCTGGACAGTCCCCA |
| | | CGGAGGCTCATCTATGAAGTGTCCAACAGGGATTCGGGGGTGCCCGACCGC |
| | | TTCACTGGCTCCGGGTCCGGCACCGACTTCACCTTGAAAATCTCCAGAGTG |
| | | GAAGCCGAGGACGTGGGCGTGTACTACTGTATGCAGGGTACCCACTGGCCT |
| | | GGAACCTTTGGACAAGGAACTAAGCTCGAGATTAAGACCACTACCCCAGCA |
| | | CCGAGGCCACCCACCCCGGCTCCTACCATCGCCTCCCAGCCTCTGTCCCTG |
| | | CGTCCGGAGGCATGTAGACCCGCAGCTGGTGGGGCCGTGCATACCCGGGGT |
| | | CTTGACTTCGCCTGCGATATCTACATTTGGGCCCCTCTGGCTGGTACTTGC |
| | | GGGGTCCTGCTGCTTTCACTCGTGATCACTCTTTACTGTAAGCGCGGTCGG |
| | | AAGAAGCTGCTGTACATCTTTAAGCAACCCTTCATGAGGCCTGTGCAGACT |
| | | ACTCAAGAGGAGGACGGCTGTTCATGCCGGTTCCCAGAGGAGGAGGAAGGC |
| | | GGCTGCGAACTGCGCGTGAAATTCAGCCGCAGCGCAGATGCTCCAGCCTAC |
| | | AAGCAGGGGCAGAACCAGCTCTACAACGAACTCAATCTTGGTCGGAGAGAG |
| | | GAGTACGACGTGCTGGACAAGCGGAGAGGACGGGACCCAGAAATGGGCGGG |
| | | AAGCCGCGCAGAAAGAATCCCCAAGAGGGCCTGTACAACGAGCTCCAAAAG |
| | | GATAAGATGGCAGAAGCCTATAGCGAGATTGGTATGAAAGGGGAACGCAGA |
| | | AGAGGCAAAGGCCACGACGGACTGTACCAGGGACTCAGCACCGCCACCAAG |
| | | GACACCTATGACGCTCTTCACATGCAGGCCCTGCCGCCTCGG |

139112

| | | |
|---|---|---|
| 139112-aa | 961 | MALPVTALLLPLALLLHAARPQVQLVESGGGLVQPGGSLRLSCAVSGFALS |
| Full CAR | | NHGMSWVRRAPGKGLEWVSGIVYSGSTYYAASVKGRFTISRDNSRNTLYLQ |
| | | MNSLRPEDTAIYYCSAHGGESDVWGQGTTVTVSSASGGGGSGGRASGGGGS |
| | | DIRLTQSPSPLSASVGDRVTITCQASEDINKFLNWYHQTPGKAPKLLIYDA |
| | | STLQTGVPSRFSGSGSGTDFTLTINSLQPEDIGTYYCQQYESLPLTFGGGT |
| | | KVEIKTTTPAPRPPTPAPTIASQPLSLRPEACRPAAGGAVHTRGLDFACDI |
| | | YIWAPLAGTCGVLLLSLVITLYCKRGRKKLLYIFKQPFMRPVQTTQEEDGC |
| | | SCRFPEEEEGGCELRVKFSRSADAPAYKQGQNQLYNELNLGRREEYDVLDK |
| | | RRGRDPEMGGKPRRKNPQEGLYNELQKDKMAEAYSEIGMKGERRRGKGHDG |
| | | LYQGLSTATKDTYDALHMQALPPR |
| 139112-nt | 976 | ATGGCCCTCCCTGTCACCGCCCTGCTGCTTCCGCTGGCTCTTCTGCTCCAC |
| Full CAR | | GCCGCTCGGCCCCAAGTGCAACTCGTGGAATCTGGTGGAGGACTCGTGCAA |
| | | CCCGGTGGAAGCCTTAGGCTGTCGTGCGCCGTCAGCGGGTTTGCTCTGAGC |
| | | AACCATGGAATGTCCTGGGTCCGCCGGGCACCGGGAAAAGGGCTGGAATGG |
| | | GTGTCCGGCATCGTGTACAGCGGGTCAACCTATTACGCCGCGTCCGTGAAG |
| | | GGCAGATTCACTATCTCAAGAGACAACAGCCGGAACACCCTGTACTTGCAA |
| | | ATGAATTCCCTGCGCCCCGAGGACACCGCCATCTACTACTGCTCCGCCCAC |
| | | GGAGGAGAGTCGGACGTGTGGGGCCAGGGAACGACTGTGACTGTGTCCAGC |
| | | GCATCAGGAGGGGGTGGTTCGGGCGGCCGGGCCTCGGGGGGAGGAGGTTCC |
| | | GACATTCGGCTGACCCAGTCCCCGTCCCCACTGTCGGCCTCCGTCGGCGAC |
| | | CGCGTGACCATCACTTGTCAGGCGTCCGAGGACATTAACAAGTTCCTGAAC |
| | | TGGTACCACCAGACCCCTGGAAAGGCCCCCAAGCTGCTGATCTACGATGCC |
| | | TCGACCCTTCAAACTGGAGTGCCTAGCCGGTTCTCCGGGTCCGGCTCCGGC |
| | | ACTGATTTCACTCTGACCATCAACTCATTGCAGCCGGAAGATATCGGGACC |
| | | TACTATTGCCAGCAGTACGAATCCCTCCCGCTCACATTCGGCGGGGGAACC |
| | | AAGGTCGAGATTAAGACCACTACCCCAGCACCGAGGCCACCCACCCCGGCT |
| | | CCTACCATCGCCTCCCAGCCTCTGTCCCTGCGTCCGGAGGCATGTAGACCC |
| | | GCAGCTGGTGGGGCCGTGCATACCCGGGGTCTTGACTTCGCCTGCGATATC |
| | | TACATTTGGGCCCCTCTGGCTGGTACTTGCGGGGTCCTGCTGCTTTCACTC |
| | | GTGATCACTCTTTACTGTAAGCGCGGTCGGAAGAAGCTGCTGTACATCTTT |
| | | AAGCAACCCTTCATGAGGCCTGTGCAGACTACTCAAGAGGAGGACGGCTGT |
| | | TCATGCCGGTTCCCAGAGGAGGAGGAAGGCGGCTGCGAACTGCGCGTGAAA |
| | | TTCAGCCGCAGCGCAGATGCTCCAGCCTACAAGCAGGGGCAGAACCAGCTC |
| | | TACAACGAACTCAATCTTGGTCGGAGAGAGGAGTACGACGTGCTGGACAAG |
| | | CGGAGAGGACGGGACCCAGAAATGGGCGGGAAGCCGCGCAGAAAGAATCCC |
| | | CAAGAGGGCCTGTACAACGAGCTCCAAAAGGATAAGATGGCAGAAGCCTAT |
| | | AGCGAGATTGGTATGAAAGGGGAACGCAGAAGAGGCAAAGGCCACGACGGA |
| | | CTGTACCAGGGACTCAGCACCGCCACCAAGGACACCTATGACGCTCTTCAC |
| | | ATGCAGGCCCTGCCGCCTCGG |

139113

| | | |
|---|---|---|
| 139113-aa | 962 | MALPVTALLLPLALLLHAARPEVQLVETGGGLVQPGGSLRLSCAVSGFALS |
| Full CAR | | NHGMSWVRRAPGKGLEWVSGIVYSGSTYYAASVKGRFTISRDNSRNTLYLQ |
| | | MNSLRPEDTAIYYCSAHGGESDVWGQGTTVTVSSASGGGGSGGRASGGGGS |
| | | ETTLTQSPATLSVSPGERATLSCRASQSVGSNLAWYQQKPGQGPRLLIYGA |
| | | STRATGIPARFSGSGSGTEFTLTISSLQPEDFAVYYCQQYNDWLPVTFGQG |
| | | TKVEIKTTTPAPRPPTPAPTIASQPLSLRPEACRPAAGGAVHTRGLDFACD |
| | | IYIWAPLAGTCGVLLLSLVITLYCKRGRKKLLYIFKQPFMRPVQTTQEEDG |
| | | CSCRFPEEEEGGCELRVKFSRSADAPAYKQGQNQLYNELNLGRREEYDVLD |
| | | KRRGRDPEMGGKPRRKNPQEGLYNELQKDKMAEAYSEIGMKGERRRGKGHD |
| | | GLYQGLSTATKDTYDALHMQALPPR |
| 139113-nt | 977 | ATGGCCCTCCCTGTCACCGCCCTGCTGCTTCCGCTGGCTCTTCTGCTCCAC |
| Full CAR | | GCCGCTCGGCCCGAAGTGCAATTGGTGGAAACTGGAGGAGGACTTGTGCAA |
| | | CCTGGAGGATCATTGCGGCTCTCATGCGCTGTCTCCGGCTTCGCCCTGTCA |
| | | AATCACGGGATGTCGTGGGTCAGACGGGCCCCGGGAAAGGGTCTGGAATGG |
| | | GTGTCGGGGATTGTGTACAGCGGCTCCACCTACTACGCCGCTTCGGTCAAG |
| | | GGCCGCTTCACTATTTCACGGGACAACAGCCGCAACACCCTCTATCTGCAA |
| | | ATGAACTCTCTCCGCCCGGAGGATACCGCCATCTACTACTGCTCCGCACAC |
| | | GGCGGCGAATCCGACGTGTGGGGACAGGGAACCACTGTCACCGTGTCGTCC |
| | | GCATCCGGTGGCGGAGGATCGGGTGGCCGGGCCTCCGGGGGCGGCGGCAGC |
| | | GAGACTACCCTGACCCAGTCCCCTGCCACTCTGTCCGTGAGCCCGGGAGAG |
| | | AGAGCCACCCTTAGCTGCCGGGCCAGCCAGAGCGTGGGCTCCAACCTGGCC |
| | | TGGTACCAGCAGAAGCCAGGACAGGGTCCCAGGCTGCTGATCTACGGAGCC |
| | | TCCACTCGCGCGACCGGCATCCCCGCGAGGTTCTCCGGGTCGGGTTCCGGG |
| | | ACCGAGTTCACCCTGACCATCTCCTCCCTCCAACCGGAGGACTTCGCGGTG |
| | | TACTACTGTCAGCAGTACAACGATTGGCTGCCCGTGACATTTGGACAGGGG |
| | | ACGAAGGTGGAAATCAAAACCACTACCCCAGCACCGAGGCCACCCACCCCG |
| | | GCTCCTACCATCGCCTCCCAGCCTCTGTCCCTGCGTCCGGAGGCATGTAGA |
| | | CCCGCAGCTGGTGGGGCCGTGCATACCCGGGGTCTTGACTTCGCCTGCGAT |
| | | ATCTACATTTGGGCCCCTCTGGCTGGTACTTGCGGGGTCCTGCTGCTTTCA |
| | | CTCGTGATCACTCTTTACTGTAAGCGCGGTCGGAAGAAGCTGCTGTACATC |
| | | TTTAAGCAACCCTTCATGAGGCCTGTGCAGACTACTCAAGAGGAGGACGGC |
| | | TGTTCATGCCGGTTCCCAGAGGAGGAGGAAGGCGGCTGCGAACTGCGCGTG |
| | | AAATTCAGCCGCAGCGCAGATGCTCCAGCCTACAAGCAGGGGCAGAACCAG |
| | | CTCTACAACGAACTCAATCTTGGTCGGAGAGAGGAGTACGACGTGCTGGAC |
| | | AAGCGGAGAGGACGGGACCCAGAAATGGGCGGGAAGCCGCGCAGAAAGAAT |
| | | CCCCAAGAGGGCCTGTACAACGAGCTCCAAAAGGATAAGATGGCAGAAGCC |
| | | TATAGCGAGATTGGTATGAAAGGGGAACGCAGAAGAGGCAAAGGCCACGAC |
| | | GGACTGTACCAGGGACTCAGCACCGCCACCAAGGACACCTATGACGCTCTT |
| | | CACATGCAGGCCCTGCCGCCTCGG |

139114

| | | |
|---|---|---|
| 139114-aa | 963 | MALPVTALLLPLALLLHAARPEVQLVESGGGLVQPGGSLRLSCAVSGFALS |
| Full CAR | | NHGMSWVRRAPGKGLEWVSGIVYSGSTYYAASVKGRFTISRDNSRNTLYLQ |
| | | MNSLRPEDTAIYYCSAHGGESDVWGQGTTVTVSSASGGGGSGGRASGGGGS |
| | | EIVLTQSPGTLSLSPGERATLSCRASQSIGSSSLAWYQQKPGQAPRLLMYG |
| | | ASSRASGIPDRFSGSGSGTDFTLTISRLEPEDFAVYYCQQYAGSPPFTFGQ |
| | | GTKVEIKTTTPAPRPPTPAPTIASQPLSLRPEACRPAAGGAVHTRGLDFAC |
| | | DIYIWAPLAGTCGVLLLSLVITLYCKRGRKKLLYIFKQPFMRPVQTTQEED |
| | | GCSCRFPEEEEGGCELRVKFSRSADAPAYKQGQNQLYNELNLGRREEYDVL |
| | | DKRRGRDPEMGGKPRRKNPQEGLYNELQKDKMAEAYSEIGMKGERRRGKGH |
| | | DGLYQGLSTATKDTYDALHMQALPPR |
| 139114-nt | 978 | ATGGCCCTCCCTGTCACCGCCCTGCTGCTTCCGCTGGCTCTTCTGCTCCAC |
| Full CAR | | GCCGCTCGGCCCGAAGTGCAATTGGTGGAATCTGGTGGAGGACTTGTGCAA |
| | | CCTGGAGGATCACTGAGACTGTCATGCGCGGTGTCCGGTTTTGCCCTGAGC |
| | | AATCATGGGATGTCGTGGGTCCGGCGCGCCCCCGGAAAGGGTCTGGAATGG |
| | | GTGTCGGGTATCGTCTACTCCGGGAGCACTTACTACGCCGCGAGCGTGAAG |
| | | GGCCGCTTCACCATTTCCCGCGATAACTCCCGCAACACCCTGTACTTGCAA |
| | | ATGAACTCGCTCCGGCCTGAGGACACTGCCATCTACTACTGCTCCGCACAC |
| | | GGAGGAGAATCCGACGTGTGGGGCCAGGGAACTACCGTGACCGTCAGCAGC |
| | | GCCTCCGGCGGCGGGGGCTCAGGCGGACGGGCTAGCGGCGGCGGTGGCTCC |
| | | GAGATCGTGCTGACCCAGTCGCCTGGCACTCTCTCGCTGAGCCCCGGGGAA |
| | | AGGGCAACCCTGTCCTGTCGGGCCAGCCAGTCCATTGGATCATCCTCCCTC |
| | | GCCTGGTATCAGCAGAAACCGGGACAGGCTCCGCGGCTGCTTATGTATGGG |
| | | GCCAGCTCAAGAGCCTCCGGCATTCCCGACCGGTTCTCCGGGTCCGGTTCC |
| | | GGCACCGATTTCACCCTGACTATCTCGAGGCTGGAGCCAGAGGACTTCGCC |
| | | GTGTACTACTGCCAGCAGTACGCGGGGTCCCCGCCGTTCACGTTCGGACAG |
| | | GGAACCAAGGTCGAGATCAAGACCACTACCCCAGCACCGAGGCCACCCACC |
| | | CCGGCTCCTACCATCGCCTCCCAGCCTCTGTCCCTGCGTCCGGAGGCATGT |
| | | AGACCCGCAGCTGGTGGGGCCGTGCATACCCGGGGTCTTGACTTCGCCTGC |
| | | GATATCTACATTTGGGCCCCTCTGGCTGGTACTTGCGGGGTCCTGCTGCTT |
| | | TCACTCGTGATCACTCTTTACTGTAAGCGCGGTCGGAAGAAGCTGCTGTAC |
| | | ATCTTTAAGCAACCCTTCATGAGGCCTGTGCAGACTACTCAAGAGGAGGAC |
| | | GGCTGTTCATGCCGGTTCCCAGAGGAGGAGGAAGGCGGCTGCGAACTGCGC |
| | | GTGAAATTCAGCCGCAGCGCAGATGCTCCAGCCTACAAGCAGGGGCAGAAC |
| | | CAGCTCTACAACGAACTCAATCTTGGTCGGAGAGAGGAGTACGACGTGCTG |
| | | GACAAGCGGAGAGGACGGGACCCAGAAATGGGCGGGAAGCCGCGCAGAAAG |
| | | AATCCCCAAGAGGGCCTGTACAACGAGCTCCAAAAGGATAAGATGGCAGAA |
| | | GCCTATAGCGAGATTGGTATGAAAGGGGAACGCAGAAGAGGCAAAGGCCAC |
| | | GACGGACTGTACCAGGGACTCAGCACCGCCACCAAGGACACCTATGACGCT |
| | | CTTCACATGCAGGCCCTGCCGCCTCGG |

149362

| | | |
|---|---|---|
| 149362-aa | 979 | MALPVTALLLPLALLLHAARPQVQLQESGPGLVKPSETLSLTCTVSGGSIS |
| Full CAR | | SSYYYWGWIRQPPGKGLEWIGSIYYSGSAYYNPSLKSRVTISVDTSKNQFS |
| | | LRLSSVTAADTAVYYCARHWQEWPDAFDIWGQGTMVTVSSGGGGSGGGGSG |
| | | GGGSETTLTQSPAFMSATPGDKVIISCKASQDIDDAMNWYQQKPGEAPLFI |
| | | IQSATSPVPGIPPRFSGSGFGTDFSLTINNIESEDAAYYFCLQHDNFPLTF |
| | | GQGTKLEIKTTTPAPRPPTPAPTIASQPLSLRPEACRPAAGGAVHTRGLDF |
| | | ACDIYIWAPLAGTCGVLLLSLVITLYCKRGRKKLLYIFKQPFMRPVQTTQE |
| | | EDGCSCRFPEEEEGGCELRVKFSRSADAPAYKQGQNQLYNELNLGRREEYD |
| | | VLDKRRGRDPEMGGKPRRKNPQEGLYNELQKDKMAEAYSEIGMKGERRRGK |
| | | GHDGLYQGLSTATKDTYDALHMQALPPR |
| 149362-nt | 1001 | ATGGCCCTCCCTGTCACCGCCCTGCTGCTTCCGCTGGCTCTTCTGCTCCAC |
| Full CAR | | GCCGCTCGGCCCCAAGTGCAGCTTCAGGAAAGCGGACCGGGCCTGGTCAAG |
| | | CCATCCGAAACTCTCTCCCTGACTTGCACTGTGTCTGGCGGTTCCATCTCA |
| | | TCGTCGTACTACTACTGGGGCTGGATTAGGCAGCCGCCCGGAAAGGGACTG |
| | | GAGTGGATCGGAAGCATCTACTATTCCGGCTCGGCGTACTACAACCCTAGC |
| | | CTCAAGTCGAGAGTGACCATCTCCGTGGATACCTCCAAGAACCAGTTTTCC |
| | | CTGCGCCTGAGCTCCGTGACCGCCGCTGACACCGCCGTGTACTACTGTGCT |
| | | CGGCATTGGCAGGAATGGCCCGATGCCTTCGACATTTGGGGCCAGGGCACT |
| | | ATGGTCACTGTGTCATCCGGGGGTGGAGGCAGCGGGGGAGGAGGGTCCGGG |
| | | GGGGGAGGTTCAGAGACAACCTTGACCCAGTCACCCGCATTCATGTCCGCC |
| | | ACTCCGGGAGACAAGGTCATCATCTCGTGCAAAGCGTCCCAGGATATCGAC |
| | | GATGCCATGAATTGGTACCAGCAGAAGCCTGGCGAAGCGCCGCTGTTCATT |
| | | ATCCAATCCGCAACCTCGCCCGTGCCTGGAATCCCACCGCGGTTCAGCGGC |
| | | AGCGGTTTCGGAACCGACTTTTCCCTGACCATTAACAACATTGAGTCCGAG |
| | | GACGCCGCCTACTACTTCTGCCTGCAACACGACAACTTCCCTCTCACGTTC |
| | | GGCCAGGGAACCAAGCTGGAAATCAAGACCACTACCCCAGCACCGAGGCCA |
| | | CCCACCCCGGCTCCTACCATCGCCTCCCAGCCTCTGTCCCTGCGTCCGGAG |
| | | GCATGTAGACCCGCAGCTGGTGGGGCCGTGCATACCCGGGGTCTTGACTTC |
| | | GCCTGCGATATCTACATTTGGGCCCCTCTGGCTGGTACTTGCGGGGTCCTG |
| | | CTGCTTTCACTCGTGATCACTCTTTACTGTAAGCGCGGTCGGAAGAAGCTG |
| | | CTGTACATCTTTAAGCAACCCTTCATGAGGCCTGTGCAGACTACTCAAGAG |
| | | GAGGACGGCTGTTCATGCCGGTTCCCAGAGGAGGAGGAAGGCGGCTGCGAA |
| | | CTGCGCGTGAAATTCAGCCGCAGCGCAGATGCTCCAGCCTACAAGCAGGGG |
| | | CAGAACCAGCTCTACAACGAACTCAATCTTGGTCGGAGAGAGGAGTACGAC |
| | | GTGCTGGACAAGCGGAGAGGACGGGACCCAGAAATGGGCGGGAAGCCGCGC |
| | | AGAAAGAATCCCCAAGAGGGCCTGTACAACGAGCTCCAAAAGGATAAGATG |
| | | GCAGAAGCCTATAGCGAGATTGGTATGAAAGGGGAACGCAGAAGAGGCAAA |
| | | GGCCACGACGGACTGTACCAGGGACTCAGCACCGCCACCAAGGACACCTAT |
| | | GACGCTCTTCACATGCAGGCCCTGCCGCCTCGG |

149363

| | | |
|---|---|---|
| 149363-aa | 980 | MALPVTALLLPLALLLHAARPQVNLRESGPALVKPTQTLTLTCTFSGFSLR |
| Full CAR | | TSGMCVSWIRQPPGKALEWLARIDWDEDKFYSTSLKTRLTISKDTSDNQVV |
| | | LRMTNMDPADTATYYCARSGAGGTSATAFDIWGPGTMVTVSSGGGGSGGGG |
| | | SGGGGSDIQMTQSPSSLSASVGDRVTITCRASQDIYNNLAWFQLKPGSAPR |
| | | SLMYAANKSQSGVPSRFSGSASGTDFTLTISSLQPEDFATYYCQHYYRFPY |
| | | SFGQGTKLEIKTTTPAPRPPTPAPTIASQPLSLRPEACRPAAGGAVHTRGL |
| | | DFACDIYIWAPLAGTCGVLLLSLVITLYCKRGRKKLLYIFKQPFMRPVQTT |
| | | QEEDGCSCRFPEEEEGGCELRVKFSRSADAPAYKQGQNQLYNELNLGRREE |
| | | YDVLDKRRGRDPEMGGKPRRKNPQEGLYNELQKDKMAEAYSEIGMKGERRR |
| | | GKGHDGLYQGLSTATKDTYDALHMQALPPR |
| 149363-nt | 1002 | ATGGCCCTCCCTGTCACCGCCCTGCTGCTTCCGCTGGCTCTTCTGCTCCAC |
| Full CAR | | GCCGCTCGGCCCCAAGTCAATCTGCGCGAATCCGGCCCCGCCTTGGTCAAG |
| | | CCTACCCAGACCCTCACTCTGACCTGTACTTTCTCCGGCTTCTCCCTGCGG |
| | | ACTTCCGGGATGTGCGTGTCCTGGATCAGACAGCCTCCGGGAAAGGCCCTG |
| | | GAGTGGCTCGCTCGCATTGACTGGGATGAGGACAAGTTCTACTCCACCTCA |
| | | CTCAAGACCAGGCTGACCATCAGCAAAGATACCTCTGACAACCAAGTGGTG |
| | | CTCCGCATGACCAACATGGACCCAGCCGACACTGCCACTTACTACTGCGCG |
| | | AGGAGCGGAGCGGGCGGAACCTCCGCCACCGCCTTCGATATTTGGGGCCCG |
| | | GGTACCATGGTCACCGTGTCAAGCGGAGGAGGGGGGTCCGGGGGCGGCGGT |
| | | TCCGGGGGAGGCGGATCGGACATTCAGATGACTCAGTCACCATCGTCCCTG |
| | | AGCGCTAGCGTGGGCGACAGAGTGACAATCACTTGCCGGGCATCCCAGGAC |
| | | ATCTATAACAACCTTGCGTGGTTCCAGCTGAAGCCTGGTTCCGCACCGCGG |
| | | TCACTTATGTACGCCGCCAACAAGAGCCAGTCGGGAGTGCCGTCCCGGTTT |
| | | TCCGGTTCGGCCTCGGGAACTGACTTCACCCTGACGATCTCCAGCCTGCAA |
| | | CCCGAGGATTTCGCCACCTACTACTGCCAGCACTACTACCGCTTTCCCTAC |
| | | TCGTTCGGACAGGGAACCAAGCTGGAAATCAAGACCACTACCCCAGCACCG |
| | | AGGCCACCCACCCCGGCTCCTACCATCGCCTCCCAGCCTCTGTCCCTGCGT |
| | | CCGGAGGCATGTAGACCCGCAGCTGGTGGGGCCGTGCATACCCGGGGTCTT |
| | | GACTTCGCCTGCGATATCTACATTTGGGCCCCTCTGGCTGGTACTTGCGGG |
| | | GTCCTGCTGCTTTCACTCGTGATCACTCTTTACTGTAAGCGCGGTCGGAAG |
| | | AAGCTGCTGTACATCTTTAAGCAACCCTTCATGAGGCCTGTGCAGACTACT |
| | | CAAGAGGAGGACGGCTGTTCATGCCGGTTCCCAGAGGAGGAGGAAGGCGGC |
| | | TGCGAACTGCGCGTGAAATTCAGCCGCAGCGCAGATGCTCCAGCCTACAAG |
| | | CAGGGGCAGAACCAGCTCTACAACGAACTCAATCTTGGTCGGAGAGAGGAG |
| | | TACGACGTGCTGGACAAGCGGAGAGGACGGGACCCAGAAATGGGCGGGAAG |
| | | CCGCGCAGAAAGAATCCCCAAGAGGGCCTGTACAACGAGCTCCAAAAGGAT |
| | | AAGATGGCAGAAGCCTATAGCGAGATTGGTATGAAAGGGGAACGCAGAAGA |
| | | GGCAAAGGCCACGACGGACTGTACCAGGGACTCAGCACCGCCACCAAGGAC |
| | | ACCTATGACGCTCTTCACATGCAGGCCCTGCCGCCTCGG |

149364

| | | |
|---|---|---|
| 149364-aa | 981 | MALPVTALLLPLALLLHAARPEVQLVESGGGLVKPGGSLRLSCAASGFTFS |
| Full CAR | | SYSMNWVRQAPGKGLEWVSSISSSSSYIYYADSVKGRFTISRDNAKNSLYL |
| | | QMNSLRAEDTAVYYCAKTIAAVYAFDIWGQGTTVTVSSGGGGSGGGGSGGG |
| | | GSEIVLTQSPLSLPVTPEEPASISCRSSQSLLHSNGYNYLDWYLQKPGQSP |
| | | QLLIYLGSNRASGVPDRFSGSGSGTDFTLKISRVEAEDVGVYYCMQALQTP |
| | | YTFGQGTKLEIKTTTPAPRPPTPAPTIASQPLSLRPEACRPAAGGAVHTRG |
| | | LDFACDIYIWAPLAGTCGVLLLSLVITLYCKRGRKKLLYIFKQPFMRPVQT |
| | | TQEEDGCSCRFPEEEEGGCELRVKFSRSADAPAYKQGQNQLYNELNLGRRE |
| | | EYDVLDKRRGRDPEMGGKPRRKNPQEGLYNELQKDKMAEAYSEIGMKGERR |
| | | RGKGHDGLYQGLSTATKDTYDALHMQALPPR |
| 149364-nt | 1003 | ATGGCCCTCCCTGTCACCGCCCTGCTGCTTCCGCTGGCTCTTCTGCTCCAC |
| Full CAR | | GCCGCTCGGCCCGAAGTGCAGCTTGTCGAATCCGGGGGGGGACTGGTCAAG |
| | | CCGGGCGGATCACTGAGACTGTCCTGCGCCGCGAGCGGCTTCACGTTCTCC |
| | | TCCTACTCCATGAACTGGGTCCGCCAAGCCCCCGGGAAGGGACTGGAATGG |
| | | GTGTCCTCTATCTCCTCGTCGTCGTCCTACATCTACTACGCCGACTCCGTG |
| | | AAGGGAAGATTCACCATTTCCCGCGACAACGCAAAGAACTCACTGTACTTG |
| | | CAAATGAACTCACTCCGGGCCGAAGATACTGCTGTGTACTATTGCGCCAAG |
| | | ACTATTGCCGCCGTCTACGCTTTCGACATCTGGGGCCAGGGAACCACCGTG |
| | | ACTGTGTCGTCCGGTGGTGGTGGCTCGGGCGGAGGAGGAAGCGGCGGCGGG |
| | | GGGTCCGAGATTGTGCTGACCCAGTCGCCACTGAGCCTCCCTGTGACCCCC |
| | | GAGGAACCCGCCAGCATCAGCTGCCGGTCCAGCCAGTCCCTGCTCCACTCC |
| | | AACGGATACAATTACCTCGATTGGTACCTTCAGAAGCCTGGACAAAGCCCG |
| | | CAGCTGCTCATCTACTTGGGATCAAACCGCGCGTCAGGAGTGCCTGACCGG |
| | | TTCTCCGGCTCGGGCAGCGGTACCGATTTCACCCTGAAAATCTCCAGGGTG |
| | | GAGGCAGAGGACGTGGGAGTGTATTACTGTATGCAGGCGCTGCAGACTCCG |
| | | TACACATTTGGGCAGGGCACCAAGCTGGAGATCAAGACCACTACCCCAGCA |
| | | CCGAGGCCACCCACCCCGGCTCCTACCATCGCCTCCCAGCCTCTGTCCCTG |
| | | CGTCCGGAGGCATGTAGACCCGCAGCTGGTGGGGCCGTGCATACCCGGGGT |
| | | CTTGACTTCGCCTGCGATATCTACATTTGGGCCCCTCTGGCTGGTACTTGC |
| | | GGGGTCCTGCTGCTTTCACTCGTGATCACTCTTTACTGTAAGCGCGGTCGG |
| | | AAGAAGCTGCTGTACATCTTTAAGCAACCCTTCATGAGGCCTGTGCAGACT |
| | | ACTCAAGAGGAGGACGGCTGTTCATGCCGGTTCCCAGAGGAGGAGGAAGGC |
| | | GGCTGCGAACTGCGCGTGAAATTCAGCCGCAGCGCAGATGCTCCAGCCTAC |
| | | AAGCAGGGGCAGAACCAGCTCTACAACGAACTCAATCTTGGTCGGAGAGAG |
| | | GAGTACGACGTGCTGGACAAGCGGAGAGGACGGGACCCAGAAATGGGCGGG |
| | | AAGCCGCGCAGAAAGAATCCCCAAGAGGGCCTGTACAACGAGCTCCAAAAG |
| | | GATAAGATGGCAGAAGCCTATAGCGAGATTGGTATGAAAGGGGAACGCAGA |
| | | AGAGGCAAAGGCCACGACGGACTGTACCAGGGACTCAGCACCGCCACCAAG |
| | | GACACCTATGACGCTCTTCACATGCAGGCCCTGCCGCCTCGG |

149365

| | | |
|---|---|---|
| 149365-aa | 982 | MALPVTALLLPLALLLHAARPEVQLVESGGGLVKPGGSLRLSCAASGFTFS |
| Full CAR | | DYYMSWIRQAPGKGLEWVSYISSSGSTIYYADSVKGRFTISRDNAKNSLYL |
| | | QMNSLRAEDTAVYYCARDLRGAFDIWGQGTMVTVSSGGGGSGGGGSGGGGS |
| | | SYVLTQSPSVSAAPGYTATISCGGNNIGTKSVHWYQQKPGQAPLLVIRDDS |
| | | VRPSKIPGRFSGSNSGNMATLTISGVQAGDEADFYCQVWDSDSEHVVFGGG |
| | | TKLTVLTTTPAPRPPTPAPTIASQPLSLRPEACRPAAGGAVHTRGLDFACD |
| | | IYIWAPLAGTCGVLLLSLVITLYCKRGRKKLLYIFKQPFMRPVQTTQEEDG |
| | | CSCRFPEEEEGGCELRVKFSRSADAPAYKQGQNQLYNELNLGRREEYDVLD |
| | | KRRGRDPEMGGKPRRKNPQEGLYNELQKDKMAEAYSEIGMKGERRRGKGHD |
| | | GLYQGLSTATKDTYDALHMQALPPR |
| 149365-nt | 1004 | ATGGCCCTCCCTGTCACCGCCCTGCTGCTTCCGCTGGCTCTTCTGCTCCAC |
| Full CAR | | GCCGCTCGGCCCGAAGTCCAGCTCGTGGAGTCCGGCGGAGGCCTTGTGAAG |
| | | CCTGGAGGTTCGCTGAGACTGTCCTGCGCCGCCTCCGGCTTCACCTTCTCC |
| | | GACTACTACATGTCCTGGATCAGACAGGCCCCGGGAAAGGGCCTGGAATGG |
| | | GTGTCCTACATCTCGTCATCGGGCAGCACTATCTACTACGCGGACTCAGTG |
| | | AAGGGGCGGTTCACCATTTCCCGGGATAACGCGAAGAACTCGCTGTATCTG |
| | | CAAATGAACTCACTGAGGGCCGAGGACACCGCCGTGTACTACTGCGCCCGC |
| | | GATCTCCGCGGGGCATTTGACATCTGGGGACAGGGAACCATGGTCACAGTG |
| | | TCCAGCGGAGGGGGAGGATCGGGTGGCGGAGGTTCCGGGGGTGGAGGCTCC |
| | | TCCTACGTGCTGACTCAGAGCCCAAGCGTCAGCGCTGCGCCCGGTTACACG |
| | | GCAACCATCTCCTGTGGCGGAAACAACATTGGGACCAAGTCTGTGCACTGG |
| | | TATCAGCAGAAGCCGGGCCAAGCTCCCCTGTTGGTGATCCGCGATGACTCC |
| | | GTGCGGCCTAGCAAAATTCCGGGACGGTTCTCCGGCTCCAACAGCGGCAAT |
| | | ATGGCCACTCTCACCATCTCGGGAGTGCAGGCCGGAGATGAAGCCGACTTC |
| | | TACTGCCAAGTCTGGGACTCAGACTCCGAGCATGTGGTGTTCGGGGGCGGA |
| | | ACCAAGCTGACTGTGCTCACCACTACCCCAGCACCGAGGCCACCCACCCCG |
| | | GCTCCTACCATCGCCTCCCAGCCTCTGTCCCTGCGTCCGGAGGCATGTAGA |
| | | CCCGCAGCTGGTGGGGCCGTGCATACCCGGGGTCTTGACTTCGCCTGCGAT |
| | | ATCTACATTTGGGCCCCTCTGGCTGGTACTTGCGGGGTCCTGCTGCTTTCA |
| | | CTCGTGATCACTCTTTACTGTAAGCGCGGTCGGAAGAAGCTGCTGTACATC |
| | | TTTAAGCAACCCTTCATGAGGCCTGTGCAGACTACTCAAGAGGAGGACGGC |
| | | TGTTCATGCCGGTTCCCAGAGGAGGAGGAAGGCGGCTGCGAACTGCGCGTG |
| | | AAATTCAGCCGCAGCGCAGATGCTCCAGCCTACAAGCAGGGGCAGAACCAG |
| | | CTCTACAACGAACTCAATCTTGGTCGGAGAGAGGAGTACGACGTGCTGGAC |
| | | AAGCGGAGAGGACGGGACCCAGAAATGGGCGGGAAGCCGCGCAGAAAGAAT |
| | | CCCCAAGAGGGCCTGTACAACGAGCTCCAAAAGGATAAGATGGCAGAAGCC |
| | | TATAGCGAGATTGGTATGAAAGGGGAACGCAGAAGAGGCAAAGGCCACGAC |
| | | GGACTGTACCAGGGACTCAGCACCGCCACCAAGGACACCTATGACGCTCTT |
| | | CACATGCAGGCCCTGCCGCCTCGG |

149366

| | | |
|---|---|---|
| 149366-aa | 983 | MALPVTALLLPLALLLHAARPQVQLVQSGAEVKKPGASVKVSCKPSGYTVT |
| Full CAR | | SHYIHWVRRAPGQGLEWMGMINPSGGVTAYSQTLQGRVTMTSDTSSSTVYM |
| | | ELSSLRSEDTAMYYCAREGSGSGWYFDFWGRGTLVTVSSGGGGSGGGGSGG |
| | | GGSSYVLTQPPSVSVSPGQTASITCSGDGLSKKYVSWYQQKAGQSPVVLIS |
| | | RDKERPSGIPDRFSGSNSADTATLTISGTQAMDEADYYCQAWDDTTVVFGG |
| | | GTKLTVLTTTPAPRPPTPAPTIASQPLSLRPEACRPAAGGAVHTRGLDFAC |
| | | DIYIWAPLAGTCGVLLLSLVITLYCKRGRKKLLYIFKQPFMRPVQTTQEED |
| | | GCSCRFPEEEEGGCELRVKFSRSADAPAYKQGQNQLYNELNLGRREEYDVL |
| | | DKRRGRDPEMGGKPRRKNPQEGLYNELQKDKMAEAYSEIGMKGERRRGKGH |
| | | DGLYQGLSTATKDTYDALHMQALPPR |
| 149366-nt | 1005 | ATGGCCCTCCCTGTCACCGCCCTGCTGCTTCCGCTGGCTCTTCTGCTCCAC |
| Full CAR | | GCCGCTCGGCCCCAAGTGCAGCTGGTGCAGAGCGGGGCCGAAGTCAAGAAG |
| | | CCGGGAGCCTCCGTGAAAGTGTCCTGCAAGCCTTCGGGATACACCGTGACC |
| | | TCCCACTACATTCATTGGGTCCGCCGCGCCCCCGGCCAAGGACTCGAGTGG |
| | | ATGGGCATGATCAACCCTAGCGGCGGAGTGACCGCGTACAGCCAGACGCTG |
| | | CAGGGACGCGTGACTATGACCTCGGATACCTCCTCCTCCACCGTCTATATG |
| | | GAACTGTCCAGCCTGCGGTCCGAGGATACCGCCATGTACTACTGCGCCCGG |
| | | GAAGGATCAGGCTCCGGGTGGTATTTCGACTTCTGGGGAAGAGGCACCCTC |
| | | GTGACTGTGTCATCTGGGGGAGGGGGTTCCGGTGGTGGCGGATCGGGAGGA |
| | | GGCGGTTCATCCTACGTGCTGACCCAGCCACCCTCCGTGTCCGTGAGCCCC |
| | | GGCCAGACTGCATCGATTACATGTAGCGGCGACGGCCTCTCCAAGAAATAC |
| | | GTGTCGTGGTACCAGCAGAAGGCCGGACAGAGCCCGGTGGTGCTGATCTCA |
| | | AGAGATAAGGAGCGGCCTAGCGGAATCCCGGACAGGTTCTCGGGTTCCAAC |
| | | TCCGCGGACACTGCTACTCTGACCATCTCGGGGACCCAGGCTATGGACGAA |
| | | GCCGATTACTACTGCCAAGCCTGGGACGACACTACTGTCGTGTTTGGAGGG |
| | | GGCACCAAGTTGACCGTCCTTACCACTACCCCAGCACCGAGGCCACCCACC |
| | | CCGGCTCCTACCATCGCCTCCCAGCCTCTGTCCCTGCGTCCGGAGGCATGT |
| | | AGACCCGCAGCTGGTGGGGCCGTGCATACCCGGGGTCTTGACTTCGCCTGC |
| | | GATATCTACATTTGGGCCCCTCTGGCTGGTACTTGCGGGGTCCTGCTGCTT |
| | | TCACTCGTGATCACTCTTTACTGTAAGCGCGGTCGGAAGAAGCTGCTGTAC |
| | | ATCTTTAAGCAACCCTTCATGAGGCCTGTGCAGACTACTCAAGAGGAGGAC |
| | | GGCTGTTCATGCCGGTTCCCAGAGGAGGAGGAAGGCGGCTGCGAACTGCGC |
| | | GTGAAATTCAGCCGCAGCGCAGATGCTCCAGCCTACAAGCAGGGGCAGAAC |
| | | CAGCTCTACAACGAACTCAATCTTGGTCGGAGAGAGGAGTACGACGTGCTG |
| | | GACAAGCGGAGAGGACGGGACCCAGAAATGGGCGGGAAGCCGCGCAGAAAG |
| | | AATCCCCAAGAGGGCCTGTACAACGAGCTCCAAAAGGATAAGATGGCAGAA |
| | | GCCTATAGCGAGATTGGTATGAAAGGGGAACGCAGAAGAGGCAAAGGCCAC |
| | | GACGGACTGTACCAGGGACTCAGCACCGCCACCAAGGACACCTATGACGCT |
| | | CTTCACATGCAGGCCCTGCCGCCTCGG |

149367

| | | |
|---|---|---|
| 149367-aa | 984 | MALPVTALLLPLALLLHAARPQVQLQESGPGLVKPSQTLSLTCTVSGGSIS |
| Full CAR | | SGGYYWSWIRQHPGKGLEWIGYIYYSGSTYYNPSLKSRVTISVDTSKNQFS |
| | | LKLSSVTAADTAVYYCARAGIAARLRGAFDIWGQGTMVTVSSGGGGSGGGG |
| | | SGGGGSDIVMTQSPSSVSASVGDRVIITCRASQGIRNWLAWYQQKPGKAPN |
| | | LLIYAASNLQSGVPSRFSGSGSGADFTLTISSLQPEDVATYYCQKYNSAPF |
| | | TFGPGTKVDIKTTTPAPRPPTPAPTIASQPLSLRPEACRPAAGGAVHTRGL |
| | | DFACDIYIWAPLAGTCGVLLLSLVITLYCKRGRKKLLYIFKQPFMRPVQTT |
| | | QEEDGCSCRFPEEEEGGCELRVKFSRSADAPAYKQGQNQLYNELNLGRREE |
| | | YDVLDKRRGRDPEMGGKPRRKNPQEGLYNELQKDKMAEAYSEIGMKGERRR |
| | | GKGHDGLYQGLSTATKDTYDALHMQALPPR |
| 149367-nt | 1006 | ATGGCCCTCCCTGTCACCGCCCTGCTGCTTCCGCTGGCTCTTCTGCTCCAC |
| Full CAR | | GCCGCTCGGCCCCAAGTGCAGCTTCAGGAGAGCGGCCCGGGACTCGTGAAG |
| | | CCGTCCCAGACCCTGTCCCTGACTTGCACCGTGTCGGGAGGAAGCATCTCG |
| | | AGCGGAGGCTACTATTGGTCGTGGATTCGGCAGCACCCTGGAAAGGGCCTG |
| | | GAATGGATCGGCTACATCTACTACTCCGGCTCGACCTACTACAACCCATCG |
| | | CTGAAGTCCAGAGTGACAATCTCAGTGGACACGTCCAAGAATCAGTTCAGC |
| | | CTGAAGCTCTCTTCCGTGACTGCGGCCGACACCGCCGTGTACTACTGCGCA |
| | | CGCGCTGGAATTGCCGCCCGGCTGAGGGGTGCCTTCGACATTTGGGGACAG |
| | | GGCACCATGGTCACCGTGTCCTCCGGCGGCGGAGGTTCCGGGGGTGGAGGC |
| | | TCAGGAGGAGGGGGGTCCGACATCGTCATGACTCAGTCGCCCTCAAGCGTC |
| | | AGCGCGTCCGTCGGGGACAGAGTGATCATCACCTGTCGGGCGTCCCAGGGA |
| | | ATTCGCAACTGGCTGGCCTGGTATCAGCAGAAGCCCGGAAAGGCCCCCAAC |
| | | CTGTTGATCTACGCCGCCTCAAACCTCCAATCCGGGGTGCCGAGCCGCTTC |
| | | AGCGGCTCCGGTTCGGGTGCCGATTTCACTCTGACCATCTCCTCCCTGCAA |
| | | CCTGAAGATGTGGCTACCTACTACTGCCAAAAGTACAACTCCGCACCTTTT |
| | | ACTTTCGGACCGGGGACCAAAGTGGACATTAAGACCACTACCCCAGCACCG |
| | | AGGCCACCCACCCCGGCTCCTACCATCGCCTCCCAGCCTCTGTCCCTGCGT |
| | | CCGGAGGCATGTAGACCCGCAGCTGGTGGGGCCGTGCATACCCGGGGTCTT |
| | | GACTTCGCCTGCGATATCTACATTTGGGCCCCTCTGGCTGGTACTTGCGGG |
| | | GTCCTGCTGCTTTCACTCGTGATCACTCTTTACTGTAAGCGCGGTCGGAAG |
| | | AAGCTGCTGTACATCTTTAAGCAACCCTTCATGAGGCCTGTGCAGACTACT |
| | | CAAGAGGAGGACGGCTGTTCATGCCGGTTCCCAGAGGAGGAGGAAGGCGGC |
| | | TGCGAACTGCGCGTGAAATTCAGCCGCAGCGCAGATGCTCCAGCCTACAAG |
| | | CAGGGGCAGAACCAGCTCTACAACGAACTCAATCTTGGTCGGAGAGAGGAG |
| | | TACGACGTGCTGGACAAGCGGAGAGGACGGGACCCAGAAATGGGCGGGAAG |
| | | CCGCGCAGAAAGAATCCCCAAGAGGGCCTGTACAACGAGCTCCAAAAGGAT |
| | | AAGATGGCAGAAGCCTATAGCGAGATTGGTATGAAAGGGGAACGCAGAAGA |
| | | GGCAAAGGCCACGACGGACTGTACCAGGGACTCAGCACCGCCACCAAGGAC |
| | | ACCTATGACGCTCTTCACATGCAGGCCCTGCCGCCTCGG |

149368

| | | |
|---|---|---|
| 149368-aa | 985 | MALPVTALLLPLALLLHAARPQVQLVQSGAEVKKPGSSVKVSCKASGGTFS |
| Full CAR | | SYAISWVRQAPGQGLEWMGGIIPIFGTANYAQKFQGRVTITADESTSTAYM |
| | | ELSSLRSEDTAVYYCARRGGYQLLRWDVGLLRSAFDIWGQGTMVTVSSGGG |
| | | GSGGGGSGGGGSSYVLTQPPSVSVAPGQTARITCGGNNIGSKSVHWYQQKP |
| | | GQAPVLVLYGKNNRPSGVPDRFSGSRSGTTASLTITGAQAEDEADYYCSSR |
| | | DSSGDHLRVFGTGTKVTVLTTTPAPRPPTPAPTIASQPLSLRPEACRPAAG |
| | | GAVHTRGLDFACDIYIWAPLAGTCGVLLLSLVITLYCKRGRKKLLYIFKQP |
| | | FMRPVQTTQEEDGCSCRFPEEEEGGCELRVKFSRSADAPAYKQGQNQLYNE |
| | | LNLGRREEYDVLDKRRGRDPEMGGKPRRKNPQEGLYNELQKDKMAEAYSEI |
| | | GMKGERRRGKGHDGLYQGLSTATKDTYDALHMQALPPR |
| 149368-nt | 1007 | ATGGCCCTCCCTGTCACCGCCCTGCTGCTTCCGCTGGCTCTTCTGCTCCAC |
| Full CAR | | GCCGCTCGGCCCCAAGTGCAGCTGGTCCAGTCGGGCGCCGAGGTCAAGAAG |
| | | CCCGGGAGCTCTGTGAAAGTGTCCTGCAAGGCCTCCGGGGGCACCTTTAGC |
| | | TCCTACGCCATCTCCTGGGTCCGCCAAGCACCGGGTCAAGGCCTGGAGTGG |
| | | ATGGGGGGAATTATCCCTATCTTCGGCACTGCCAACTACGCCCAGAAGTTC |
| | | CAGGGACGCGTGACCATTACCGCGGACGAATCCACCTCCACCGCTTATATG |
| | | GAGCTGTCCAGCTTGCGCTCGGAAGATACCGCCGTGTACTACTGCGCCCGG |
| | | AGGGGTGGATACCAGCTGCTGAGATGGGACGTGGGCCTCCTGCGGTCGGCG |
| | | TTCGACATCTGGGGCCAGGGCACTATGGTCACTGTGTCCAGCGGAGGAGGC |
| | | GGATCGGGAGGCGGCGGATCAGGGGGAGGCGGTTCCAGCTACGTGCTTACT |
| | | CAACCCCCTTCGGTGTCCGTGGCCCCGGGACAGACCGCCAGAATCACTTGC |
| | | GGAGGAAACAACATTGGGTCCAAGAGCGTGCATTGGTACCAGCAGAAGCCA |
| | | GGACAGGCCCCTGTGCTGGTGCTCTACGGGAAGAACAATCGGCCCAGCGGA |
| | | GTGCCGGACAGGTTCTCGGGTTCACGCTCCGGTACAACCGCTTCACTGACT |
| | | ATCACCGGGGCCCAGGCAGAGGATGAAGCGGACTACTACTGTTCCTCCCGG |
| | | GATTCATCCGGCGACCACCTCCGGGTGTTCGGAACCGGAACGAAGGTCACC |
| | | GTGCTGACCACTACCCCAGCACCGAGGCCACCCACCCCGGCTCCTACCATC |
| | | GCCTCCCAGCCTCTGTCCCTGCGTCCGGAGGCATGTAGACCCGCAGCTGGT |
| | | GGGGCCGTGCATACCCGGGGTCTTGACTTCGCCTGCGATATCTACATTTGG |
| | | GCCCCTCTGGCTGGTACTTGCGGGGTCCTGCTGCTTTCACTCGTGATCACT |
| | | CTTTACTGTAAGCGCGGTCGGAAGAAGCTGCTGTACATCTTTAAGCAACCC |
| | | TTCATGAGGCCTGTGCAGACTACTCAAGAGGAGGACGGCTGTTCATGCCGG |
| | | TTCCCAGAGGAGGAGGAAGGCGGCTGCGAACTGCGCGTGAAATTCAGCCGC |
| | | AGCGCAGATGCTCCAGCCTACAAGCAGGGGCAGAACCAGCTCTACAACGAA |
| | | CTCAATCTTGGTCGGAGAGAGGAGTACGACGTGCTGGACAAGCGGAGAGGA |
| | | CGGGACCCAGAAATGGGCGGGAAGCCGCGCAGAAAGAATCCCCAAGAGGGC |
| | | CTGTACAACGAGCTCCAAAAGGATAAGATGGCAGAAGCCTATAGCGAGATT |
| | | GGTATGAAAGGGGAACGCAGAAGAGGCAAAGGCCACGACGGACTGTACCAG |
| | | GGACTCAGCACCGCCACCAAGGACACCTATGACGCTCTTCACATGCAGGCC |
| | | CTGCCGCCTCGG |

149369

| | | |
|---|---|---|
| 149369-aa | 986 | MALPVTALLLPLALLLHAARPEVQLQQSGPGLVKPSQTLSLTCAISGDSVS |
| Full CAR | | SNSAAWNWIRQSPSRGLEWLGRTYYRSKWYSFYAISLKSRIIINPDTSKNQ |
| | | FSLQLKSVTPEDTAVYYCARSSPEGLFLYWFDPWGQGTLVTVSSGGDGSGG |
| | | GGSGGGGSSSELTQDPAVSVALGQTIRITCQGDSLGNYYATWYQQKPGQAP |
| | | VLVIYGTNNRPSGIPDRFSASSSGNTASLTITGAQAEDEADYYCNSRDSSG |
| | | HHLLFGTGTKVTVLTTTPAPRPPTPAPTIASQPLSLRPEACRPAAGGAVHT |
| | | RGLDFACDIYIWAPLAGTCGVLLLSLVITLYCKRGRKKLLYIFKQPFMRPV |
| | | QTTQEEDGCSCRFPEEEEGGCELRVKFSRSADAPAYKQGQNQLYNELNLGR |
| | | REEYDVLDKRRGRDPEMGGKPRRKNPQEGLYNELQKDKMAEAYSEIGMKGE |
| | | RRRGKGHDGLYQGLSTATKDTYDALHMQALPPR |
| 149369-nt | 1008 | ATGGCCCTCCCTGTCACCGCCCTGCTGCTTCCGCTGGCTCTTCTGCTCCAC |
| Full CAR | | GCCGCTCGGCCCGAAGTGCAGCTCCAACAGTCAGGACCGGGGCTCGTGAAG |
| | | CCATCCCAGACCCTGTCCCTGACTTGTGCCATCTCGGGAGATAGCGTGTCA |
| | | TCGAACTCCGCCGCCTGGAACTGGATTCGGCAGAGCCCGTCCCGCGGACTG |
| | | GAGTGGCTTGGAAGGACCTACTACCGGTCCAAGTGGTACTCTTTCTACGCG |
| | | ATCTCGCTGAAGTCCCGCATTATCATTAACCCTGATACCTCCAAGAATCAG |
| | | TTCTCCCTCCAACTGAAATCCGTCACCCCCGAGGACACAGCAGTGTATTAC |
| | | TGCGCACGGAGCAGCCCCGAAGGACTGTTCCTGTATTGGTTTGACCCCTGG |
| | | GGCCAGGGGACTCTTGTGACCGTGTCGAGCGGCGGAGATGGGTCCGGTGGC |
| | | GGTGGTTCGGGGGGCGGCGGATCATCATCCGAACTGACCCAGGACCCGGCT |
| | | GTGTCCGTGGCGCTGGGACAAACCATCCGCATTACGTGCCAGGGAGACTCC |
| | | CTGGGCAACTACTACGCCACTTGGTACCAGCAGAAGCCGGGCCAAGCCCCT |
| | | GTGTTGGTCATCTACGGGACCAACAACAGACCTTCCGGCATCCCCGACCGG |
| | | TTCAGCGCTTCGTCCTCCGGCAACACTGCCAGCCTGACCATCACTGGAGCG |
| | | CAGGCCGAAGATGAGGCCGACTACTACTGCAACAGCAGAGACTCCTCGGGT |
| | | CATCACCTCTTGTTCGGAACTGGAACCAAGGTCACCGTGCTGACCACTACC |
| | | CCAGCACCGAGGCCACCCACCCCGGCTCCTACCATCGCCTCCCAGCCTCTG |
| | | TCCCTGCGTCCGGAGGCATGTAGACCCGCAGCTGGTGGGGCCGTGCATACC |
| | | CGGGGTCTTGACTTCGCCTGCGATATCTACATTTGGGCCCCTCTGGCTGGT |
| | | ACTTGCGGGGTCCTGCTGCTTTCACTCGTGATCACTCTTTACTGTAAGCGC |
| | | GGTCGGAAGAAGCTGCTGTACATCTTTAAGCAACCCTTCATGAGGCCTGTG |
| | | CAGACTACTCAAGAGGAGGACGGCTGTTCATGCCGGTTCCCAGAGGAGGAG |
| | | GAAGGCGGCTGCGAACTGCGCGTGAAATTCAGCCGCAGCGCAGATGCTCCA |
| | | GCCTACAAGCAGGGGCAGAACCAGCTCTACAACGAACTCAATCTTGGTCGG |
| | | AGAGAGGAGTACGACGTGCTGGACAAGCGGAGAGGACGGGACCCAGAAATG |
| | | GGCGGGAAGCCGCGCAGAAAGAATCCCCAAGAGGGCCTGTACAACGAGCTC |
| | | CAAAAGGATAAGATGGCAGAAGCCTATAGCGAGATTGGTATGAAAGGGGAA |
| | | CGCAGAAGAGGCAAAGGCCACGACGGACTGTACCAGGGACTCAGCACCGCC |
| | | ACCAAGGACACCTATGACGCTCTTCACATGCAGGCCCTGCCGCCTCGG |

BCMA_EBB-C1978-A4

| | | |
|---|---|---|
| BCMA_EBB- | 987 | MALPVTALLLPLALLLHAARPEVQLVESGGGLVQPGGSLRLSCAASGFTFS |
| C1978-A4- | | SYAMSWVRQAPGKGLEWVSAISGSGGSTYYADSVKGRFTISRDNSKNTLYL |
| aa | | QMNSLRAEDTAVYYCAKVEGSGSLDYWGQGTLVTVSSGGGGSGGGGSGGGG |
| Full CART | | SEIVMTQSPGTLSLSPGERATLSCRASQSVSSAYLAWYQQKPGQPPRLLIS |
| | | GASTRATGIPDRFGGSGSGTDFTLTISRLEPEDFAVYYCQHYGSSFNGSSL |
| | | FTFGQGTRLEIKTTTPAPRPPTPAPTIASQPLSLRPEACRPAAGGAVHTRG |
| | | LDFACDIYIWAPLAGTCGVLLLSLVITLYCKRGRKKLLYIFKQPFMRPVQT |
| | | TQEEDGCSCRFPEEEEGGCELRVKFSRSADAPAYKQGQNQLYNELNLGRRE |
| | | EYDVLDKRRGRDPEMGGKPRRKNPQEGLYNELQKDKMAEAYSEIGMKGERR |
| | | RGKGHDGLYQGLSTATKDTYDALHMQALPPR |
| BCMA_EBB- | 1009 | ATGGCCCTCCCTGTCACCGCCCTGCTGCTTCCGCTGGCTCTTCTGCTCCAC |
| C1978-A4- | | GCCGCTCGGCCCGAAGTGCAGCTCGTGGAGTCAGGAGGCGGCCTGGTCCAG |
| nt | | CCGGGAGGGTCCCTTAGACTGTCATGCGCCGCAAGCGGATTCACTTTCTCC |
| Full CART | | TCCTATGCCATGAGCTGGGTCCGCCAAGCCCCCGGAAAGGGACTGGAATGG |
| | | GTGTCCGCCATCTCGGGGTCTGGAGGCTCAACTTACTACGCTGACTCCGTG |
| | | AAGGGACGGTTCACCATTAGCCGCGACAACTCCAAGAACACCCTCTACCTC |
| | | CAAATGAACTCCCTGCGGGCCGAGGATACCGCCGTCTACTACTGCGCCAAA |
| | | GTGGAAGGTTCAGGATCGCTGGACTACTGGGGACAGGGTACTCTCGTGACC |
| | | GTGTCATCGGGCGGAGGAGGTTCCGGCGGTGGCGGCTCCGGCGGCGGAGGG |
| | | TCGGAGATCGTGATGACCCAGAGCCCTGGTACTCTGAGCCTTTCGCCGGGA |
| | | GAAAGGGCCACCCTGTCCTGCCGCGCTTCCCAATCCGTGTCCTCCGCGTAC |
| | | TTGGCGTGGTACCAGCAGAAGCCGGGACAGCCCCCTCGGCTGCTGATCAGC |
| | | GGGGCCAGCACCCGGGCAACCGGAATCCCAGACAGATTCGGGGGTTCCGGC |
| | | AGCGGCACAGATTTCACCCTGACTATTTCGAGGTTGGAGCCCGAGGACTTT |
| | | GCGGTGTATTACTGTCAGCACTACGGGTCGTCCTTTAATGGCTCCAGCCTG |
| | | TTCACGTTCGGACAGGGGACCCGCCTGGAAATCAAGACCACTACCCCAGCA |
| | | CCGAGGCCACCCACCCCGGCTCCTACCATCGCCTCCCAGCCTCTGTCCCTG |
| | | CGTCCGGAGGCATGTAGACCCGCAGCTGGTGGGGCCGTGCATACCCGGGGT |
| | | CTTGACTTCGCCTGCGATATCTACATTTGGGCCCCTCTGGCTGGTACTTGC |
| | | GGGGTCCTGCTGCTTTCACTCGTGATCACTCTTTACTGTAAGCGCGGTCGG |
| | | AAGAAGCTGCTGTACATCTTTAAGCAACCCTTCATGAGGCCTGTGCAGACT |
| | | ACTCAAGAGGAGGACGGCTGTTCATGCCGGTTCCCAGAGGAGGAGGAAGGC |
| | | GGCTGCGAACTGCGCGTGAAATTCAGCCGCAGCGCAGATGCTCCAGCCTAC |
| | | AAGCAGGGGCAGAACCAGCTCTACAACGAACTCAATCTTGGTCGGAGAGAG |
| | | GAGTACGACGTGCTGGACAAGCGGAGAGGACGGGACCCAGAAATGGGCGGG |
| | | AAGCCGCGCAGAAAGAATCCCCAAGAGGGCCTGTACAACGAGCTCCAAAAG |
| | | GATAAGATGGCAGAAGCCTATAGCGAGATTGGTATGAAAGGGGAACGCAGA |
| | | AGAGGCAAAGGCCACGACGGACTGTACCAGGGACTCAGCACCGCCACCAAG |
| | | GACACCTATGACGCTCTTCACATGCAGGCCCTGCCGCCTCGG |

BCMA_EBB-C1978-G1

| | | |
|---|---|---|
| BCMA_EBB- | 988 | MALPVTALLLPLALLLHAARPEVQLVETGGGLVQPGGSLRLSCAASGITFS |
| C1978-G1- | | RYPMSWVRQAPGKGLEWVSGISDSGVSTYYADSAKGRFTISRDNSKNTLFL |
| aa | | QMSSLRDEDTAVYYCVTRAGSEASDIWGQGTMVTVSSGGGGSGGGGSGGGG |
| Full CART | | SEIVLTQSPATLSLSPGERATLSCRASQSVSNSLAWYQQKPGQAPRLLIYD |
| | | ASSRATGIPDRFSGSGSGTDFTLTISRLEPEDFAIYYCQQFGTSSGLTFGG |
| | | GTKLEIKTTTPAPRPPTPAPTIASQPLSLRPEACRPAAGGAVHTRGLDFAC |
| | | DIYIWAPLAGTCGVLLLSLVITLYCKRGRKKLLYIFKQPFMRPVQTTQEED |
| | | GCSCRFPEEEEGGCELRVKFSRSADAPAYKQGQNQLYNELNLGRREEYDVL |
| | | DKRRGRDPEMGGKPRRKNPQEGLYNELQKDKMAEAYSEIGMKGERRRGKGH |
| | | DGLYQGLSTATKDTYDALHMQALPPR |
| BCMA_EBB- | 1010 | ATGGCCCTCCCTGTCACCGCCCTGCTGCTTCCGCTGGCTCTTCTGCTCCAC |
| C1978-G1- | | GCCGCTCGGCCCGAAGTGCAACTGGTGGAAACCGGTGGCGGCCTGGTGCAG |
| nt | | CCTGGAGGATCATTGAGGCTGTCATGCGCGGCCAGCGGTATTACCTTCTCC |
| Full CART | | CGGTACCCCATGTCCTGGGTCAGACAGGCCCCGGGGAAAGGGCTTGAATGG |
| | | GTGTCCGGGATCTCGGACTCCGGTGTCAGCACTTACTACGCCGACTCCGCC |
| | | AAGGGACGCTTCACCATTTCCCGGGACAACTCGAAGAACACCCTGTTCCTC |
| | | CAAATGAGCTCCCTCCGGGACGAGGATACTGCAGTGTACTACTGCGTGACC |
| | | CGCGCCGGGTCCGAGGCGTCTGACATTTGGGGACAGGGCACTATGGTCACC |
| | | GTGTCGTCCGGCGGAGGGGGCTCGGGAGGCGGTGGCAGCGGAGGAGGAGGG |
| | | TCCGAGATCGTGCTGACCCAATCCCCGGCCACCCTCTCGCTGAGCCCTGGA |
| | | GAAAGGGCAACCTTGTCCTGTCGCGCGAGCCAGTCCGTGAGCAACTCCCTG |
| | | GCCTGGTACCAGCAGAAGCCCGGACAGGCTCCGAGACTTCTGATCTACGAC |
| | | GCTTCGAGCCGGGCCACTGGAATCCCCGACCGCTTTTCGGGGTCCGGCTCA |
| | | GGAACCGATTTCACCCTGACAATCTCACGGCTGGAGCCAGAGGATTTCGCC |
| | | ATCTATTACTGCCAGCAGTTCGGTACTTCCTCCGGCCTGACTTTCGGAGGC |
| | | GGCACGAAGCTCGAAATCAAGACCACTACCCCAGCACCGAGGCCACCCACC |
| | | CCGGCTCCTACCATCGCCTCCCAGCCTCTGTCCCTGCGTCCGGAGGCATGT |
| | | AGACCCGCAGCTGGTGGGGCCGTGCATACCCGGGGTCTTGACTTCGCCTGC |
| | | GATATCTACATTTGGGCCCCTCTGGCTGGTACTTGCGGGGTCCTGCTGCTT |
| | | TCACTCGTGATCACTCTTTACTGTAAGCGCGGTCGGAAGAAGCTGCTGTAC |
| | | ATCTTTAAGCAACCCTTCATGAGGCCTGTGCAGACTACTCAAGAGGAGGAC |
| | | GGCTGTTCATGCCGGTTCCCAGAGGAGGAGGAAGGCGGCTGCGAACTGCGC |
| | | GTGAAATTCAGCCGCAGCGCAGATGCTCCAGCCTACAAGCAGGGGCAGAAC |
| | | CAGCTCTACAACGAACTCAATCTTGGTCGGAGAGAGGAGTACGACGTGCTG |
| | | GACAAGCGGAGAGGACGGGACCCAGAAATGGGCGGGAAGCCGCGCAGAAAG |
| | | AATCCCCAAGAGGGCCTGTACAACGAGCTCCAAAAGGATAAGATGGCAGAA |
| | | GCCTATAGCGAGATTGGTATGAAAGGGGAACGCAGAAGAGGCAAAGGCCAC |
| | | GACGGACTGTACCAGGGACTCAGCACCGCCACCAAGGACACCTATGACGCT |
| | | CTTCACATGCAGGCCCTGCCGCCTCGG |

BCMA_EBB-C1979-C1

| | | |
|---|---|---|
| BCMA_EBB- | 989 | MALPVTALLLPLALLLHAARPQVQLVESGGGLVQPGGSLRLSCAASGFTFS |
| C1979-C1- | | SYAMSWVRQAPGKGLEWVSAISGSGGSTYYADSVKGRFTISRDNAKNSLYL |
| aa | | QMNSLRAEDTAIYYCARATYKRELRYYYGMDVWGQGTMVTVSSGGGGSGGG |
| Full CART | | GSGGGGSEIVMTQSPGTVSLSPGERATLSCRASQSVSSSFLAWYQQKPGQA |
| | | PRLLIYGASSRATGIPDRFSGSGSGTDFTLTISRLEPEDSAVYYCQQYHSS |
| | | PSWTFGQGTRLEIKTTTPAPRPPTPAPTIASQPLSLRPEACRPAAGGAVHT |
| | | RGLDFACDIYIWAPLAGTCGVLLLSLVITLYCKRGRKKLLYIFKQPFMRPV |
| | | QTTQEEDGCSCRFPEEEEGGCELRVKFSRSADAPAYKQGQNQLYNELNLGR |
| | | REEYDVLDKRRGRDPEMGGKPRRKNPQEGLYNELQKDKMAEAYSEIGMKGE |
| | | RRRGKGHDGLYQGLSTATKDTYDALHMQALPPR |
| BCMA_EBB- | 1011 | ATGGCCCTCCCTGTCACCGCCCTGCTGCTTCCGCTGGCTCTTCTGCTCCAC |
| C1979-C1- | | GCCGCTCGGCCCCAAGTGCAGCTCGTGGAATCGGGTGGCGGACTGGTGCAG |
| nt | | CCGGGGGGCTCACTTAGACTGTCCTGCGCGGCCAGCGGATTCACTTTCTCC |
| Full CART | | TCCTACGCCATGTCCTGGGTCAGACAGGCCCCTGGAAAGGGCCTGGAATGG |
| | | GTGTCCGCAATCAGCGGCAGCGGCGGCTCGACCTATTACGCGGATTCAGTG |
| | | AAGGGCAGATTCACCATTTCCCGGGACAACGCCAAGAACTCCTTGTACCTT |
| | | CAAATGAACTCCCTCCGCGCGGAAGATACCGCAATCTACTACTGCGCTCGG |
| | | GCCACTTACAAGAGGGAACTGCGCTACTACTACGGGATGGACGTCTGGGGC |
| | | CAGGGAACCATGGTCACCGTGTCCAGCGGAGGAGGAGGATCGGGAGGAGGC |
| | | GGTAGCGGGGGTGGAGGGTCGGAGATCGTGATGACCCAGTCCCCCGGCACT |
| | | GTGTCGCTGTCCCCCGGCGAACGGGCCACCCTGTCATGTCGGGCCAGCCAG |
| | | TCAGTGTCGTCAAGCTTCCTCGCCTGGTACCAGCAGAAACCGGGACAAGCT |
| | | CCCCGCCTGCTGATCTACGGAGCCAGCAGCCGGGCCACCGGTATTCCTGAC |
| | | CGGTTCTCCGGTTCGGGGTCCGGGACCGACTTTACTCTGACTATCTCTCGC |
| | | CTCGAGCCAGAGGACTCCGCCGTGTATTACTGCCAGCAGTACCACTCCTCC |
| | | CCGTCCTGGACGTTCGGACAGGGCACAAGGCTGGAGATTAAGACCACTACC |
| | | CCAGCACCGAGGCCACCCACCCCGGCTCCTACCATCGCCTCCCAGCCTCTG |
| | | TCCCTGCGTCCGGAGGCATGTAGACCCGCAGCTGGTGGGGCCGTGCATACC |
| | | CGGGGTCTTGACTTCGCCTGCGATATCTACATTTGGGCCCCTCTGGCTGGT |
| | | ACTTGCGGGGTCCTGCTGCTTTCACTCGTGATCACTCTTTACTGTAAGCGC |
| | | GGTCGGAAGAAGCTGCTGTACATCTTTAAGCAACCCTTCATGAGGCCTGTG |
| | | CAGACTACTCAAGAGGAGGACGGCTGTTCATGCCGGTTCCCAGAGGAGGAG |
| | | GAAGGCGGCTGCGAACTGCGCGTGAAATTCAGCCGCAGCGCAGATGCTCCA |
| | | GCCTACAAGCAGGGGCAGAACCAGCTCTACAACGAACTCAATCTTGGTCGG |
| | | AGAGAGGAGTACGACGTGCTGGACAAGCGGAGAGGACGGGACCCAGAAATG |
| | | GGCGGGAAGCCGCGCAGAAAGAATCCCCAAGAGGGCCTGTACAACGAGCTC |
| | | CAAAAGGATAAGATGGCAGAAGCCTATAGCGAGATTGGTATGAAAGGGGAA |
| | | CGCAGAAGAGGCAAAGGCCACGACGGACTGTACCAGGGACTCAGCACCGCC |
| | | ACCAAGGACACCTATGACGCTCTTCACATGCAGGCCCTGCCGCCTCGG |

BCMA_EBB-C1978-C7

| | | |
|---|---|---|
| BCMA_EBB- | 990 | MALPVTALLLPLALLLHAARPEVQLVETGGGLVQPGGSLRLSCAASGFTFS |
| C1978-C7- | | SYAMSWVRQAPGKGLEWVSAISGSGGSTYYADSVKGRFTISRDNSKNTLYL |
| aa | | QMNTLKAEDTAVYYCARATYKRELRYYYGMDVWGQGTTVTVSSGGGGSGGG |
| Full CART | | GSGGGGSEIVLTQSPSTLSLSPGESATLSCRASQSVSTTFLAWYQQKPGQA |
| | | PRLLIYGSSNRATGIPDRFSGSGSGTDFTLTIRRLEPEDFAVYYCQQYHSS |
| | | PSWTFGQGTKVEIKTTTPAPRPPTPAPTIASQPLSLRPEACRPAAGGAVHT |
| | | RGLDFACDIYIWAPLAGTCGVLLLSLVITLYCKRGRKKLLYIFKQPFMRPV |
| | | QTTQEEDGCSCRFPEEEEGGCELRVKFSRSADAPAYKQGQNQLYNELNLGR |
| | | REEYDVLDKRRGRDPEMGGKPRRKNPQEGLYNELQKDKMAEAYSEIGMKGE |
| | | RRRGKGHDGLYQGLSTATKDTYDALHMQALPPR |
| BCMA_EBB- | 1012 | ATGGCCCTCCCTGTCACCGCCCTGCTGCTTCCGCTGGCTCTTCTGCTCCAC |
| C1978-C7- | | GCCGCTCGGCCCGAGGTGCAGCTTGTGGAAACCGGTGGCGGACTGGTGCAG |
| nt | | CCCGGAGGAAGCCTCAGGCTGTCCTGCGCCGCGTCCGGCTTCACCTTCTCC |
| Full CART | | TCGTACGCCATGTCCTGGGTCCGCCAGGCCCCCGGAAAGGGCCTGGAATGG |
| | | GTGTCCGCCATCTCTGGAAGCGGAGGTTCCACGTACTACGCGGACAGCGTC |
| | | AAGGGAAGGTTCACAATCTCCCGCGATAATTCGAAGAACACTCTGTACCTT |
| | | CAAATGAACACCCTGAAGGCCGAGGACACTGCTGTGTACTACTGCGCACGG |
| | | GCCACCTACAAGAGAGAGCTCCGGTACTACTACGGAATGGACGTCTGGGGC |
| | | CAGGGAACTACTGTGACCGTGTCCTCGGGAGGGGGTGGCTCCGGGGGGGGC |
| | | GGCTCCGGCGGAGGCGGTTCCGAGATTGTGCTGACCCAGTCACCTTCAACT |
| | | CTGTCGCTGTCCCCGGGAGAGAGCGCTACTCTGAGCTGCCGGGCCAGCCAG |
| | | TCCGTGTCCACCACCTTCCTCGCCTGGTATCAGCAGAAGCCGGGGCAGGCA |
| | | CCACGGCTCTTGATCTACGGGTCAAGCAACAGAGCGACCGGAATTCCTGAC |
| | | CGCTTCTCGGGGAGCGGTTCAGGCACCGACTTCACCCTGACTATCCGGCGC |
| | | CTGGAACCCGAAGATTTCGCCGTGTATTACTGTCAACAGTACCACTCCTCG |
| | | CCGTCCTGGACCTTTGGCCAAGGAACCAAAGTGGAAATCAAGACCACTACC |
| | | CCAGCACCGAGGCCACCCACCCCGGCTCCTACCATCGCCTCCCAGCCTCTG |
| | | TCCCTGCGTCCGGAGGCATGTAGACCCGCAGCTGGTGGGGCCGTGCATACC |
| | | CGGGGTCTTGACTTCGCCTGCGATATCTACATTTGGGCCCCTCTGGCTGGT |
| | | ACTTGCGGGGTCCTGCTGCTTTCACTCGTGATCACTCTTTACTGTAAGCGC |
| | | GGTCGGAAGAAGCTGCTGTACATCTTTAAGCAACCCTTCATGAGGCCTGTG |
| | | CAGACTACTCAAGAGGAGGACGGCTGTTCATGCCGGTTCCCAGAGGAGGAG |
| | | GAAGGCGGCTGCGAACTGCGCGTGAAATTCAGCCGCAGCGCAGATGCTCCA |
| | | GCCTACAAGCAGGGGCAGAACCAGCTCTACAACGAACTCAATCTTGGTCGG |
| | | AGAGAGGAGTACGACGTGCTGGACAAGCGGAGAGGACGGGACCCAGAAATG |
| | | GGCGGGAAGCCGCGCAGAAAGAATCCCCAAGAGGGCCTGTACAACGAGCTC |
| | | CAAAAGGATAAGATGGCAGAAGCCTATAGCGAGATTGGTATGAAAGGGGAA |
| | | CGCAGAAGAGGCAAAGGCCACGACGGACTGTACCAGGGACTCAGCACCGCC |
| | | ACCAAGGACACCTATGACGCTCTTCACATGCAGGCCCTGCCGCCTCGG |

BCMA_EBB-C1978-D10

| | | |
|---|---|---|
| BCMA_EBB- | 991 | MALPVTALLLPLALLLHAARPEVQLVETGGGLVQPGRSLRLSCAASGFTFD |
| C1978-D10- | | DYAMHWVRQAPGKGLEWVSGISWNSGSIGYADSVKGRFTISRDNAKNSLYL |
| aa | | QMNSLRDEDTAVYYCARVGKAVPDVWGQGTTVTVSSGGGGSGGGGSGGGGS |
| Full CART | | DIVMTQTPSSLSASVGDRVTITCRASQSISSYLNWYQQKPGKAPKLLIYAA |
| | | SSLQSGVPSRFSGSGSGTDFTLTISSLQPEDFATYYCQQSYSTPYSFGQGT |
| | | RLEIKTTTPAPRPPTPAPTIASQPLSLRPEACRPAAGGAVHTRGLDFACDI |
| | | YIWAPLAGTCGVLLLSLVITLYCKRGRKKLLYIFKQPFMRPVQTTQEEDGC |
| | | SCRFPEEEEGGCELRVKFSRSADAPAYKQGQNQLYNELNLGRREEYDVLDK |
| | | RRGRDPEMGGKPRRKNPQEGLYNELQKDKMAEAYSEIGMKGERRRGKGHDG |
| | | LYQGLSTATKDTYDALHMQALPPR |
| BCMA_EBB- | 1013 | ATGGCCCTCCCTGTCACCGCCCTGCTGCTTCCGCTGGCTCTTCTGCTCCAC |
| C1978-D10- | | GCCGCTCGGCCCGAAGTGCAGCTCGTGGAAACTGGAGGTGGACTCGTGCAG |
| nt | | CCTGGACGGTCGCTGCGGCTGAGCTGCGCTGCATCCGGCTTCACCTTCGAC |
| Full CART | | GATTATGCCATGCACTGGGTCAGACAGGCGCCAGGGAAGGGACTTGAGTGG |
| | | GTGTCCGGTATCAGCTGGAATAGCGGCTCAATCGGATACGCGGACTCCGTG |
| | | AAGGGAAGGTTCACCATTTCCCGCGACAACGCCAAGAACTCCCTGTACTTG |
| | | CAAATGAACAGCCTCCGGGATGAGGACACTGCCGTGTACTACTGCGCCCGC |
| | | GTCGGAAAAGCTGTGCCCGACGTCTGGGGCCAGGGAACCACTGTGACCGTG |
| | | TCCAGCGGCGGGGGTGGATCGGGCGGTGGAGGGTCCGGTGGAGGGGGCTCA |
| | | GATATTGTGATGACCCAGACCCCCTCGTCCCTGTCCGCCTCGGTCGGCGAC |
| | | CGCGTGACTATCACATGTAGAGCCTCGCAGAGCATCTCCAGCTACCTGAAC |
| | | TGGTATCAGCAGAAGCCGGGGAAGGCCCCGAAGCTCCTGATCTACGCGGCA |
| | | TCATCACTGCAATCGGGAGTGCCGAGCCGGTTTTCCGGGTCCGGCTCCGGC |
| | | ACCGACTTCACGCTGACCATTTCTTCCCTGCAACCCGAGGACTTCGCCACT |
| | | TACTACTGCCAGCAGTCCTACTCCACCCCTTACTCCTTCGGCCAAGGAACC |
| | | AGGCTGGAAATCAAGACCACTACCCCAGCACCGAGGCCACCCACCCCGGCT |
| | | CCTACCATCGCCTCCCAGCCTCTGTCCCTGCGTCCGGAGGCATGTAGACCC |
| | | GCAGCTGGTGGGGCCGTGCATACCCGGGGTCTTGACTTCGCCTGCGATATC |
| | | TACATTTGGGCCCCTCTGGCTGGTACTTGCGGGGTCCTGCTGCTTTCACTC |
| | | GTGATCACTCTTTACTGTAAGCGCGGTCGGAAGAAGCTGCTGTACATCTTT |
| | | AAGCAACCCTTCATGAGGCCTGTGCAGACTACTCAAGAGGAGGACGGCTGT |
| | | TCATGCCGGTTCCCAGAGGAGGAGGAAGGCGGCTGCGAACTGCGCGTGAAA |
| | | TTCAGCCGCAGCGCAGATGCTCCAGCCTACAAGCAGGGGCAGAACCAGCTC |
| | | TACAACGAACTCAATCTTGGTCGGAGAGAGGAGTACGACGTGCTGGACAAG |
| | | CGGAGAGGACGGGACCCAGAAATGGGCGGGAAGCCGCGCAGAAAGAATCCC |
| | | CAAGAGGGCCTGTACAACGAGCTCCAAAAGGATAAGATGGCAGAAGCCTAT |
| | | AGCGAGATTGGTATGAAAGGGGAACGCAGAAGAGGCAAAGGCCACGACGGA |
| | | CTGTACCAGGGACTCAGCACCGCCACCAAGGACACCTATGACGCTCTTCAC |
| | | ATGCAGGCCCTGCCGCCTCGG |

BCMA_EBB-C1979-C12

| | | |
|---|---|---|
| BCMA_EBB- | 992 | MALPVTALLLPLALLLHAARPEVQLVESGGGLVQPGRSLRLSCTASGFTFD |
| C1979-C12- | | DYAMHWVRQRPGKGLEWVASINWKGNSLAYGDSVKGRFAISRDNAKNTVFL |
| aa | | QMNSLRTEDTAVYYCASHQGVAYYNYAMDVWGRGTLVTVSSGGGGSGGGGS |
| Full CART | | GGGGSEIVLTQSPGTLSLSPGERATLSCRATQSIGSSFLAWYQQRPGQAPR |
| | | LLIYGASQRATGIPDRFSGRGSGTDFTLTISRVEPEDSAVYYCQHYESSPS |
| | | WTFGQGTKVEIKTTTPAPRPPTPAPTIASQPLSLRPEACRPAAGGAVHTRG |
| | | LDFACDIYIWAPLAGTCGVLLLSLVITLYCKRGRKKLLYIFKQPFMRPVQT |
| | | TQEEDGCSCRFPEEEEGGCELRVKFSRSADAPAYKQGQNQLYNELNLGRRE |
| | | EYDVLDKRRGRDPEMGGKPRRKNPQEGLYNELQKDKMAEAYSEIGMKGERR |
| | | RGKGHDGLYQGLSTATKDTYDALHMQALPPR |
| BCMA_EBB- | 1014 | ATGGCCCTCCCTGTCACCGCCCTGCTGCTTCCGCTGGCTCTTCTGCTCCAC |
| C1979-C12- | | GCCGCTCGGCCCGAAGTGCAGCTCGTGGAGAGCGGGGGAGGATTGGTGCAG |
| nt | | CCCGGAAGGTCCCTGCGGCTCTCCTGCACTGCGTCTGGCTTCACCTTCGAC |
| Full CART | | GACTACGCGATGCACTGGGTCAGACAGCGCCCGGGAAAGGGCCTGGAATGG |
| | | GTCGCCTCAATCAACTGGAAGGGAAACTCCCTGGCCTATGGCGACAGCGTG |
| | | AAGGGCCGCTTCGCCATTTCGCGCGACAACGCCAAGAACACCGTGTTTCTG |
| | | CAAATGAATTCCCTGCGGACCGAGGATACCGCTGTGTACTACTGCGCCAGC |
| | | CACCAGGGCGTGGCATACTATAACTACGCCATGGACGTGTGGGGAAGAGGG |
| | | ACGCTCGTCACCGTGTCCTCCGGGGGCGGTGGATCGGGTGGAGGAGGAAGC |
| | | GGTGGCGGGGGCAGCGAAATCGTGCTGACTCAGAGCCCGGGAACTCTTTCA |
| | | CTGTCCCCGGGAGAACGGGCCACTCTCTCGTGCCGGGCCACCCAGTCCATC |
| | | GGCTCCTCCTTCCTTGCCTGGTACCAGCAGAGGCCAGGACAGGCGCCCCGC |
| | | CTGCTGATCTACGGTGCTTCCCAACGCGCCACTGGCATTCCTGACCGGTTC |
| | | AGCGGCAGAGGGTCGGGAACCGATTTCACACTGACCATTTCCCGGGTGGAG |
| | | CCCGAAGATTCGGCAGTCTACTACTGTCAGCATTACGAGTCCTCCCCTTCA |
| | | TGGACCTTCGGTCAAGGGACCAAAGTGGAGATCAAGACCACTACCCCAGCA |
| | | CCGAGGCCACCCACCCCGGCTCCTACCATCGCCTCCCAGCCTCTGTCCCTG |
| | | CGTCCGGAGGCATGTAGACCCGCAGCTGGTGGGGCCGTGCATACCCGGGGT |
| | | CTTGACTTCGCCTGCGATATCTACATTTGGGCCCCTCTGGCTGGTACTTGC |
| | | GGGGTCCTGCTGCTTTCACTCGTGATCACTCTTTACTGTAAGCGCGGTCGG |
| | | AAGAAGCTGCTGTACATCTTTAAGCAACCCTTCATGAGGCCTGTGCAGACT |
| | | ACTCAAGAGGAGGACGGCTGTTCATGCCGGTTCCCAGAGGAGGAGGAAGGC |
| | | GGCTGCGAACTGCGCGTGAAATTCAGCCGCAGCGCAGATGCTCCAGCCTAC |
| | | AAGCAGGGGCAGAACCAGCTCTACAACGAACTCAATCTTGGTCGGAGAGAG |
| | | GAGTACGACGTGCTGGACAAGCGGAGAGGACGGGACCCAGAAATGGGCGGG |
| | | AAGCCGCGCAGAAAGAATCCCCAAGAGGGCCTGTACAACGAGCTCCAAAAG |
| | | GATAAGATGGCAGAAGCCTATAGCGAGATTGGTATGAAAGGGGAACGCAGA |
| | | AGAGGCAAAGGCCACGACGGACTGTACCAGGGACTCAGCACCGCCACCAAG |
| | | GACACCTATGACGCTCTTCACATGCAGGCCCTGCCGCCTCGG |

BCMA_EBB-C1980-G4

| | | |
|---|---|---|
| BCMA_EBB- | 993 | MALPVTALLLPLALLLHAARPEVQLVESGGGLVQPGGSLRLSCAASGFTFS |
| C1980-G4- | | SYAMSWVRQAPGKGLEWVSAISGSGGSTYYADSVKGRFTISRDNSKNTLYL |
| aa | | QMNSLRAEDTAVYYCAKVVRDGMDVWGQGTTVTVSSGGGGSGGGGSGGGGS |
| Full CART | | EIVLTQSPATLSLSPGERATLSCRASQSVSSSYLAWYQQKPGQAPRLLIYG |
| | | ASSRATGIPDRFSGNGSGTDFTLTISRLEPEDFAVYYCQQYGSPPRFTFGP |
| | | GTKVDIKTTTPAPRPPTPAPTIASQPLSLRPEACRPAAGGAVHTRGLDFAC |
| | | DIYIWAPLAGTCGVLLLSLVITLYCKRGRKKLLYIFKQPFMRPVQTTQEED |
| | | GCSCRFPEEEEGGCELRVKFSRSADAPAYKQGQNQLYNELNLGRREEYDVL |
| | | DKRRGRDPEMGGKPRRKNPQEGLYNELQKDKMAEAYSEIGMKGERRRGKGH |
| | | DGLYQGLSTATKDTYDALHMQALPPR |
| BCMA_EBB- | 1015 | ATGGCCCTCCCTGTCACCGCCCTGCTGCTTCCGCTGGCTCTTCTGCTCCAC |
| C1980-G4- | | GCCGCTCGGCCCGAGGTGCAGTTGGTCGAAAGCGGGGGCGGGCTTGTGCAG |
| nt | | CCTGGCGGATCACTGCGGCTGTCCTGCGCGGCATCAGGCTTCACGTTTTCT |
| Full CART | | TCCTACGCCATGTCCTGGGTGCGCCAGGCCCCTGGAAAGGGACTGGAATGG |
| | | GTGTCCGCGATTTCGGGGTCCGGCGGGAGCACCTACTACGCCGATTCCGTG |
| | | AAGGGCCGCTTCACTATCTCGCGGGACAACTCCAAGAACACCCTCTACCTC |
| | | CAAATGAATAGCCTGCGGGCCGAGGATACCGCCGTCTACTATTGCGCTAAG |
| | | GTCGTGCGCGACGGAATGGACGTGTGGGGACAGGGTACCACCGTGACAGTG |
| | | TCCTCGGGGGGAGGCGGTAGCGGCGGAGGAGGAAGCGGTGGTGGAGGTTCC |
| | | GAGATTGTGCTGACTCAATCACCCGCGACCCTGAGCCTGTCCCCCGGCGAA |
| | | AGGGCCACTCTGTCCTGTCGGGCCAGCCAATCAGTCTCCTCCTCGTACCTG |
| | | GCCTGGTACCAGCAGAAGCCAGGACAGGCTCCGAGACTCCTTATCTATGGC |
| | | GCATCCTCCCGCGCCACCGGAATCCCGGATAGGTTCTCGGGAAACGGATCG |
| | | GGGACCGACTTCACTCTCACCATCTCCCGGCTGGAACCGGAGGACTTCGCC |
| | | GTGTACTACTGCCAGCAGTACGGCAGCCCGCCTAGATTCACTTTCGGCCCC |
| | | GGCACCAAAGTGGACATCAAGACCACTACCCCAGCACCGAGGCCACCCACC |
| | | CCGGCTCCTACCATCGCCTCCCAGCCTCTGTCCCTGCGTCCGGAGGCATGT |
| | | AGACCCGCAGCTGGTGGGGCCGTGCATACCCGGGGTCTTGACTTCGCCTGC |
| | | GATATCTACATTTGGGCCCCTCTGGCTGGTACTTGCGGGGTCCTGCTGCTT |
| | | TCACTCGTGATCACTCTTTACTGTAAGCGCGGTCGGAAGAAGCTGCTGTAC |
| | | ATCTTTAAGCAACCCTTCATGAGGCCTGTGCAGACTACTCAAGAGGAGGAC |
| | | GGCTGTTCATGCCGGTTCCCAGAGGAGGAGGAAGGCGGCTGCGAACTGCGC |
| | | GTGAAATTCAGCCGCAGCGCAGATGCTCCAGCCTACAAGCAGGGGCAGAAC |
| | | CAGCTCTACAACGAACTCAATCTTGGTCGGAGAGAGGAGTACGACGTGCTG |
| | | GACAAGCGGAGAGGACGGGACCCAGAAATGGGCGGGAAGCCGCGCAGAAAG |
| | | AATCCCCAAGAGGGCCTGTACAACGAGCTCCAAAAGGATAAGATGGCAGAA |
| | | GCCTATAGCGAGATTGGTATGAAAGGGGAACGCAGAAGAGGCAAAGGCCAC |
| | | GACGGACTGTACCAGGGACTCAGCACCGCCACCAAGGACACCTATGACGCT |
| | | CTTCACATGCAGGCCCTGCCGCCTCGG |

BCMA_EBB-C1980-D2

| | | |
|---|---|---|
| BCMA_EBB- | 994 | MALPVTALLLPLALLLHAARPEVQLLESGGGLVQPGGSLRLSCAASGFTFS |
| C1980-D2- | | SYAMSWVRQAPGKGLEWVSAISGSGGSTYYADSVKGRFTISRDNSKNTLYL |
| aa | | QMNSLRAEDTAVYYCAKIPQTGTFDYWGQGTLVTVSSGGGGSGGGGSGGGG |
| Full CART | | SEIVLTQSPGTLSLSPGERATLSCRASQSVSSSYLAWYQQRPGQAPRLLIY |
| | | GASSRATGIPDRFSGSGSGTDFTLTISRLEPEDFAVYYCQHYGSSPSWTFG |
| | | QGTRLEIKTTTPAPRPPTPAPTIASQPLSLRPEACRPAAGGAVHTRGLDFA |
| | | CDIYIWAPLAGTCGVLLLSLVITLYCKRGRKKLLYIFKQPFMRPVQTTQEE |
| | | DGCSCRFPEEEEGGCELRVKFSRSADAPAYKQGQNQLYNELNLGRREEYDV |
| | | LDKRRGRDPEMGGKPRRKNPQEGLYNELQKDKMAEAYSEIGMKGERRRGKG |
| | | HDGLYQGLSTATKDTYDALHMQALPPR |
| BCMA_EBB- | 1016 | ATGGCCCTCCCTGTCACCGCCCTGCTGCTTCCGCTGGCTCTTCTGCTCCAC |
| C1980-D2- | | GCCGCTCGGCCCGAAGTGCAGCTGCTGGAGTCCGGCGGTGGATTGGTGCAA |
| nt | | CCGGGGGGATCGCTCAGACTGTCCTGTGCGGCGTCAGGCTTCACCTTCTCG |
| Full CART | | AGCTACGCCATGTCATGGGTCAGACAGGCCCCTGGAAAGGGTCTGGAATGG |
| | | GTGTCCGCCATTTCCGGGAGCGGGGGATCTACATACTACGCCGATAGCGTG |
| | | AAGGGCCGCTTCACCATTTCCCGGGACAACTCCAAGAACACTCTCTATCTG |
| | | CAAATGAACTCCCTCCGCGCTGAGGACACTGCCGTGTACTACTGCGCCAAA |
| | | ATCCCTCAGACCGGCACCTTCGACTACTGGGGACAGGGGACTCTGGTCACC |
| | | GTCAGCAGCGGTGGCGGAGGTTCGGGGGGAGGAGGAAGCGGCGGCGGAGGG |
| | | TCCGAGATTGTGCTGACCCAGTCACCCGGCACTTTGTCCCTGTCGCCTGGA |
| | | GAAAGGGCCACCCTTTCCTGCCGGGCATCCCAATCCGTGTCCTCCTCGTAC |
| | | CTGGCCTGGTACCAGCAGAGGCCCGGACAGGCCCCACGGCTTCTGATCTAC |
| | | GGAGCAAGCAGCCGCGCGACCGGTATCCCGGACCGGTTTTCGGGCTCGGGC |
| | | TCAGGAACTGACTTCACCCTCACCATCTCCCGCCTGGAACCCGAAGATTTC |
| | | GCTGTGTATTACTGCCAGCACTACGGCAGCTCCCCGTCCTGGACGTTCGGC |
| | | CAGGGAACTCGGCTGGAGATCAAGACCACTACCCCAGCACCGAGGCCACCC |
| | | ACCCCGGCTCCTACCATCGCCTCCCAGCCTCTGTCCCTGCGTCCGGAGGCA |
| | | TGTAGACCCGCAGCTGGTGGGGCCGTGCATACCCGGGGTCTTGACTTCGCC |
| | | TGCGATATCTACATTTGGGCCCCTCTGGCTGGTACTTGCGGGGTCCTGCTG |
| | | CTTTCACTCGTGATCACTCTTTACTGTAAGCGCGGTCGGAAGAAGCTGCTG |
| | | TACATCTTTAAGCAACCCTTCATGAGGCCTGTGCAGACTACTCAAGAGGAG |
| | | GACGGCTGTTCATGCCGGTTCCCAGAGGAGGAGGAAGGCGGCTGCGAACTG |
| | | CGCGTGAAATTCAGCCGCAGCGCAGATGCTCCAGCCTACAAGCAGGGGCAG |
| | | AACCAGCTCTACAACGAACTCAATCTTGGTCGGAGAGAGGAGTACGACGTG |
| | | CTGGACAAGCGGAGAGGACGGGACCCAGAAATGGGCGGGAAGCCGCGCAGA |
| | | AAGAATCCCCAAGAGGGCCTGTACAACGAGCTCCAAAAGGATAAGATGGCA |
| | | GAAGCCTATAGCGAGATTGGTATGAAAGGGGAACGCAGAAGAGGCAAAGGC |
| | | CACGACGGACTGTACCAGGGACTCAGCACCGCCACCAAGGACACCTATGAC |
| | | GCTCTTCACATGCAGGCCCTGCCGCCTCGG |

BCMA_EBB-C1978-A10

| | | |
|---|---|---|
| BCMA_EBB- | 995 | MALPVTALLLPLALLLHAARPEVQLVETGGGLVQPGGSLRLSCAASGFTFS |
| C1978-A10- | | SYAMSWVRQAPGKGLEWVSAISGSGGSTYYADSVKGRFTMSRENDKNSVFL |
| aa | | QMNSLRVEDTGVYYCARANYKRELRYYYGMDVWGQGTMVTVSSGGGGSGGG |
| Full CART | | GSGGGGSEIVMTQSPGTLSLSPGESATLSCRASQRVASNYLAWYQHKPGQA |
| | | PSLLISGASSRATGVPDRFSGSGSGTDFTLAISRLEPEDSAVYYCQHYDSS |
| | | PSWTFGQGTKVEIKTTTPAPRPPTPAPTIASQPLSLRPEACRPAAGGAVHT |
| | | RGLDFACDIYIWAPLAGTCGVLLLSLVITLYCKRGRKKLLYIFKQPFMRPV |
| | | QTTQEEDGCSCRFPEEEEGGCELRVKFSRSADAPAYKQGQNQLYNELNLGR |
| | | REEYDVLDKRRGRDPEMGGKPRRKNPQEGLYNELQKDKMAEAYSEIGMKGE |
| | | RRRGKGHDGLYQGLSTATKDTYDALHMQALPPR |
| BCMA_EBB- | 1017 | ATGGCCCTCCCTGTCACCGCCCTGCTGCTTCCGCTGGCTCTTCTGCTCCAC |
| C1978-A10- | | GCCGCTCGGCCCGAAGTGCAACTGGTGGAAACCGGTGGAGGACTCGTGCAG |
| nt | | CCTGGCGGCAGCCTCCGGCTGAGCTGCGCCGCTTCGGGATTCACCTTTTCC |
| Full CART | | TCCTACGCGATGTCTTGGGTCAGACAGGCCCCCGGAAAGGGGCTGGAATGG |
| | | GTGTCAGCCATCTCCGGCTCCGGCGGATCAACGTACTACGCCGACTCCGTG |
| | | AAAGGCCGGTTCACCATGTCGCGCGAGAATGACAAGAACTCCGTGTTCCTG |
| | | CAAATGAACTCCCTGAGGGTGGAGGACACCGGAGTGTACTATTGTGCGCGC |
| | | GCCAACTACAAGAGAGAGCTGCGGTACTACTACGGAATGGACGTCTGGGGA |
| | | CAGGGAACTATGGTGACCGTGTCATCCGGTGGAGGGGGAAGCGGCGGTGGA |
| | | GGCAGCGGGGGCGGGGGTTCAGAAATTGTCATGACCCAGTCCCCGGGAACT |
| | | CTTTCCCTCTCCCCCGGGGAATCCGCGACTTTGTCCTGCCGGGCCAGCCAG |
| | | CGCGTGGCCTCGAACTACCTCGCATGGTACCAGCATAAGCCAGGCCAAGCC |
| | | CCTTCCCTGCTGATTTCCGGGGCTAGCAGCCGCGCCACTGGCGTGCCGGAT |
| | | AGGTTCTCGGGAAGCGGCTCGGGTACCGATTTCACCCTGGCAATCTCGCGG |
| | | CTGGAACCGGAGGATTCGGCCGTGTACTACTGCCAGCACTATGACTCATCC |
| | | CCCTCCTGGACATTCGGACAGGGCACCAAGGTCGAGATCAAGACCACTACC |
| | | CCAGCACCGAGGCCACCCACCCCGGCTCCTACCATCGCCTCCCAGCCTCTG |
| | | TCCCTGCGTCCGGAGGCATGTAGACCCGCAGCTGGTGGGGCCGTGCATACC |
| | | CGGGGTCTTGACTTCGCCTGCGATATCTACATTTGGGCCCCTCTGGCTGGT |
| | | ACTTGCGGGGTCCTGCTGCTTTCACTCGTGATCACTCTTTACTGTAAGCGC |
| | | GGTCGGAAGAAGCTGCTGTACATCTTTAAGCAACCCTTCATGAGGCCTGTG |
| | | CAGACTACTCAAGAGGAGGACGGCTGTTCATGCCGGTTCCCAGAGGAGGAG |
| | | GAAGGCGGCTGCGAACTGCGCGTGAAATTCAGCCGCAGCGCAGATGCTCCA |
| | | GCCTACAAGCAGGGGCAGAACCAGCTCTACAACGAACTCAATCTTGGTCGG |
| | | AGAGAGGAGTACGACGTGCTGGACAAGCGGAGAGGACGGGACCCAGAAATG |
| | | GGCGGGAAGCCGCGCAGAAAGAATCCCCAAGAGGGCCTGTACAACGAGCTC |
| | | CAAAAGGATAAGATGGCAGAAGCCTATAGCGAGATTGGTATGAAAGGGGAA |
| | | CGCAGAAGAGGCAAAGGCCACGACGGACTGTACCAGGGACTCAGCACCGCC |
| | | ACCAAGGACACCTATGACGCTCTTCACATGCAGGCCCTGCCGCCTCGG |

BCMA_EBB-C1978-D4

| | | |
|---|---|---|
| BCMA_EBB- | 996 | MALPVTALLLPLALLLHAARPEVQLLETGGGLVQPGGSLRLSCAASGFSFS |
| C1978-D4- | | SYAMSWVRQAPGKGLEWVSAISGSGGSTYYADSVKGRFTISRDNSKNTLYL |
| aa | | QMNSLRAEDTAVYYCAKALVGATGAFDIWGQGTLVTVSSGGGGSGGGGSGG |
| Full CART | | GGSEIVLTQSPGTLSLSPGERATLSCRASQSLSSNFLAWYQQKPGQAPGLL |
| | | IYGASNWATGTPDRFSGSGSGTDFTLTITRLEPEDFAVYYCQYYGTSPMYT |
| | | FGQGTKVEIKTTTPAPRPPTPAPTIASQPLSLRPEACRPAAGGAVHTRGLD |
| | | FACDIYIWAPLAGTCGVLLLSLVITLYCKRGRKKLLYIFKQPFMRPVQTTQ |
| | | EEDGCSCRFPEEEEGGCELRVKFSRSADAPAYKQGQNQLYNELNLGRREEY |
| | | DVLDKRRGRDPEMGGKPRRKNPQEGLYNELQKDKMAEAYSEIGMKGERRRG |
| | | KGHDGLYQGLSTATKDTYDALHMQALPPR |
| BCMA_EBB- | 1018 | ATGGCCCTCCCTGTCACCGCCCTGCTGCTTCCGCTGGCTCTTCTGCTCCAC |
| C1978-D4- | | GCCGCTCGGCCCGAAGTGCAGCTGCTCGAAACCGGTGGAGGGCTGGTGCAG |
| nt | | CCAGGGGGCTCCCTGAGGCTTTCATGCGCCGCTAGCGGATTCTCCTTCTCC |
| Full CART | | TCTTACGCCATGTCGTGGGTCCGCCAAGCCCCTGGAAAAGGCCTGGAATGG |
| | | GTGTCCGCGATTTCCGGGAGCGGAGGTTCGACCTATTACGCCGACTCCGTG |
| | | AAGGGCCGCTTTACCATCTCCCGGGATAACTCCAAGAACACTCTGTACCTC |
| | | CAAATGAACTCGCTGAGAGCCGAGGACACCGCCGTGTATTACTGCGCGAAG |
| | | GCGCTGGTCGGCGCGACTGGGGCATTCGACATCTGGGGACAGGGAACTCTT |
| | | GTGACCGTGTCGAGCGGAGGCGGCGGCTCCGGCGGAGGAGGGAGCGGGGGC |
| | | GGTGGTTCCGAAATCGTGTTGACTCAGTCCCCGGGAACCCTGAGCTTGTCA |
| | | CCCGGGGAGCGGGCCACTCTCTCCTGTCGCGCCTCCCAATCGCTCTCATCC |
| | | AATTTCCTGGCCTGGTACCAGCAGAAGCCCGGACAGGCCCCGGGCCTGCTC |
| | | ATCTACGGCGCTTCAAACTGGGCAACGGGAACCCCTGATCGGTTCAGCGGA |
| | | AGCGGATCGGGTACTGACTTTACCCTGACCATCACCAGACTGGAACCGGAG |
| | | GACTTCGCCGTGTACTACTGCCAGTACTACGGCACCTCCCCCATGTACACA |
| | | TTCGGACAGGGTACCAAGGTCGAGATTAAGACCACTACCCCAGCACCGAGG |
| | | CCACCCACCCCGGCTCCTACCATCGCCTCCCAGCCTCTGTCCCTGCGTCCG |
| | | GAGGCATGTAGACCCGCAGCTGGTGGGGCCGTGCATACCCGGGGTCTTGAC |
| | | TTCGCCTGCGATATCTACATTTGGGCCCCTCTGGCTGGTACTTGCGGGGTC |
| | | CTGCTGCTTTCACTCGTGATCACTCTTTACTGTAAGCGCGGTCGGAAGAAG |
| | | CTGCTGTACATCTTTAAGCAACCCTTCATGAGGCCTGTGCAGACTACTCAA |
| | | GAGGAGGACGGCTGTTCATGCCGGTTCCCAGAGGAGGAGGAAGGCGGCTGC |
| | | GAACTGCGCGTGAAATTCAGCCGCAGCGCAGATGCTCCAGCCTACAAGCAG |
| | | GGGCAGAACCAGCTCTACAACGAACTCAATCTTGGTCGGAGAGAGGAGTAC |
| | | GACGTGCTGGACAAGCGGAGAGGACGGGACCCAGAAATGGGCGGGAAGCCG |
| | | CGCAGAAAGAATCCCCAAGAGGGCCTGTACAACGAGCTCCAAAAGGATAAG |
| | | ATGGCAGAAGCCTATAGCGAGATTGGTATGAAAGGGGAACGCAGAAGAGGC |
| | | AAAGGCCACGACGGACTGTACCAGGGACTCAGCACCGCCACCAAGGACACC |
| | | TATGACGCTCTTCACATGCAGGCCCTGCCGCCTCGG |

BCMA_EBB-C1980-A2

| | | |
|---|---|---|
| BCMA_EBB- | 997 | MALPVTALLLPLALLLHAARPEVQLLESGGGLVQPGGSLRLSCAASGFTFS |
| C1980-A2- | | SYAMSWVRQAPGKGLEWVSAISGSGGSTYYADSVKGRFTISRDNSKNTLYL |
| aa | | QMNSLRAEDTAVYYCVLWFGEGFDPWGQGTLVTVSSGGGGSGGGGSGGGGS |
| Full CART | | DIVLTQSPLSLPVTPGEPASISCRSSQSLLHSNGYNYLDWYLQKPGQSPQL |
| | | LIYLGSNRASGVPDRFSGSGSGTDFTLKISRVEAEDVGVYYCMQALQTPLT |
| | | FGGGTKVDIKTTTPAPRPPTPAPTIASQPLSLRPEACRPAAGGAVHTRGLD |
| | | FACDIYIWAPLAGTCGVLLLSLVITLYCKRGRKKLLYIFKQPFMRPVQTTQ |
| | | EEDGCSCRFPEEEEGGCELRVKFSRSADAPAYKQGQNQLYNELNLGRREEY |
| | | DVLDKRRGRDPEMGGKPRRKNPQEGLYNELQKDKMAEAYSEIGMKGERRRG |
| | | KGHDGLYQGLSTATKDTYDALHMQALPPR |
| BCMA_EBB- | 1019 | ATGGCCCTCCCTGTCACCGCCCTGCTGCTTCCGCTGGCTCTTCTGCTCCAC |
| C1980-A2- | | GCCGCTCGGCCCGAAGTGCAGCTGCTTGAGAGCGGTGGAGGTCTGGTGCAG |
| nt | | CCCGGGGGATCACTGCGCCTGTCCTGTGCCGCGTCCGGTTTCACTTTCTCC |
| Full CART | | TCGTACGCCATGTCGTGGGTCAGACAGGCACCGGGAAAGGGACTGGAATGG |
| | | GTGTCAGCCATTTCGGGTTCGGGGGGCAGCACCTACTACGCTGACTCCGTG |
| | | AAGGGCCGGTTCACCATTTCCCGCGACAACTCCAAGAACACCTTGTACCTC |
| | | CAAATGAACTCCCTGCGGGCCGAAGATACCGCCGTGTATTACTGCGTGCTG |
| | | TGGTTCGGAGAGGGATTCGACCCGTGGGGACAAGGAACACTCGTGACTGTG |
| | | TCATCCGGCGGAGGCGGCAGCGGTGGCGGCGGTTCCGGCGGCGGCGGATCT |
| | | GACATCGTGTTGACCCAGTCCCCTCTGAGCCTGCCGGTCACTCCTGGCGAA |
| | | CCAGCCAGCATCTCCTGCCGGTCGAGCCAGTCCCTCCTGCACTCCAATGGG |
| | | TACAACTACCTCGATTGGTATCTGCAAAAGCCGGGCCAGAGCCCCCAGCTG |
| | | CTGATCTACCTTGGGTCAAACCGCGCTTCCGGGGTGCCTGATAGATTCTCC |
| | | GGGTCCGGGAGCGGAACCGACTTTACCCTGAAAATCTCGAGGGTGGAGGCC |
| | | GAGGACGTCGGAGTGTACTACTGCATGCAGGCGCTCCAGACTCCCCTGACC |
| | | TTCGGAGGAGGAACGAAGGTCGACATCAAGACCACTACCCCAGCACCGAGG |
| | | CCACCCACCCCGGCTCCTACCATCGCCTCCCAGCCTCTGTCCCTGCGTCCG |
| | | GAGGCATGTAGACCCGCAGCTGGTGGGGCCGTGCATACCCGGGGTCTTGAC |
| | | TTCGCCTGCGATATCTACATTTGGGCCCCTCTGGCTGGTACTTGCGGGGTC |
| | | CTGCTGCTTTCACTCGTGATCACTCTTTACTGTAAGCGCGGTCGGAAGAAG |
| | | CTGCTGTACATCTTTAAGCAACCCTTCATGAGGCCTGTGCAGACTACTCAA |
| | | GAGGAGGACGGCTGTTCATGCCGGTTCCCAGAGGAGGAGGAAGGCGGCTGC |
| | | GAACTGCGCGTGAAATTCAGCCGCAGCGCAGATGCTCCAGCCTACAAGCAG |
| | | GGGCAGAACCAGCTCTACAACGAACTCAATCTTGGTCGGAGAGAGGAGTAC |
| | | GACGTGCTGGACAAGCGGAGAGGACGGGACCCAGAAATGGGCGGGAAGCCG |
| | | CGCAGAAAGAATCCCCAAGAGGGCCTGTACAACGAGCTCCAAAAGGATAAG |
| | | ATGGCAGAAGCCTATAGCGAGATTGGTATGAAAGGGGAACGCAGAAGAGGC |
| | | AAAGGCCACGACGGACTGTACCAGGGACTCAGCACCGCCACCAAGGACACC |
| | | TATGACGCTCTTCACATGCAGGCCCTGCCGCCTCGG |

BCMA_EBB-C1981-C3

| | | |
|---|---|---|
| BCMA_EBB- | 998 | MALPVTALLLPLALLLHAARPQVQLVESGGGLVQPGGSLRLSCAASGFTFS |
| C1981-C3- | | SYAMSWVRQAPGKGLEWVSAISGSGGSTYYADSVKGRFTISRDNSKNTLYL |
| aa | | QMNSLRAEDTAVYYCAKVGYDSSGYYRDYYGMDVWGQGTTVTVSSGGGGSG |
| Full CART | | GGGSGGGGSEIVLTQSPGTLSLSPGERATLSCRASQSVSSSYLAWYQQKPG |
| | | QAPRLLIYGTSSRATGISDRFSGSGSGTDFTLTISRLEPEDFAVYYCQHYG |
| | | NSPPKFTFGPGTKLEIKTTTPAPRPPTPAPTIASQPLSLRPEACRPAAGGA |
| | | VHTRGLDFACDIYIWAPLAGTCGVLLLSLVITLYCKRGRKKLLYIFKQPFM |
| | | RPVQTTQEEDGCSCRFPEEEEGGCELRVKFSRSADAPAYKQGQNQLYNELN |
| | | LGRREEYDVLDKRRGRDPEMGGKPRRKNPQEGLYNELQKDKMAEAYSEIGM |
| | | KGERRRGKGHDGLYQGLSTATKDTYDALHMQALPPR |
| BCMA_EBB- | 1020 | ATGGCCCTCCCTGTCACCGCCCTGCTGCTTCCGCTGGCTCTTCTGCTCCAC |
| C1981-C3- | | GCCGCTCGGCCCCAAGTGCAGCTCGTGGAGTCAGGCGGAGGACTGGTGCAG |
| nt | | CCCGGGGGCTCCCTGAGACTTTCCTGCGCGGCATCGGGTTTTACCTTCTCC |
| Full CART | | TCCTATGCTATGTCCTGGGTGCGCCAGGCCCCGGGAAAGGGACTGGAATGG |
| | | GTGTCCGCAATCAGCGGTAGCGGGGGCTCAACATACTACGCCGACTCCGTC |
| | | AAGGGTCGCTTCACTATTTCCCGGGACAACTCCAAGAATACCCTGTACCTC |
| | | CAAATGAACAGCCTCAGGGCCGAGGATACTGCCGTGTACTACTGCGCCAAA |
| | | GTCGGATACGATAGCTCCGGTTACTACCGGGACTACTACGGAATGGACGTG |
| | | TGGGGACAGGGCACCACCGTGACCGTGTCAAGCGGCGGAGGCGGTTCAGGA |
| | | GGGGGAGGCTCCGGCGGTGGAGGGTCCGAAATCGTCCTGACTCAGTCGCCT |
| | | GGCACTCTGTCGTTGTCCCCGGGGGAGCGCGCTACCCTGTCGTGTCGGGCG |
| | | TCGCAGTCCGTGTCGAGCTCCTACCTCGCGTGGTACCAGCAGAAGCCCGGA |
| | | CAGGCCCCTAGACTTCTGATCTACGGCACTTCTTCACGCGCCACCGGGATC |
| | | AGCGACAGGTTCAGCGGCTCCGGCTCCGGGACCGACTTCACCCTGACCATT |
| | | AGCCGGCTGGAGCCTGAAGATTTCGCCGTGTATTACTGCCAACACTACGGA |
| | | AACTCGCCGCCAAAGTTCACGTTCGGACCCGGAACCAAGCTGGAAATCAAG |
| | | ACCACTACCCCAGCACCGAGGCCACCCACCCCGGCTCCTACCATCGCCTCC |
| | | CAGCCTCTGTCCCTGCGTCCGGAGGCATGTAGACCCGCAGCTGGTGGGGCC |
| | | GTGCATACCCGGGGTCTTGACTTCGCCTGCGATATCTACATTTGGGCCCCT |
| | | CTGGCTGGTACTTGCGGGGTCCTGCTGCTTTCACTCGTGATCACTCTTTAC |
| | | TGTAAGCGCGGTCGGAAGAAGCTGCTGTACATCTTTAAGCAACCCTTCATG |
| | | AGGCCTGTGCAGACTACTCAAGAGGAGGACGGCTGTTCATGCCGGTTCCCA |
| | | GAGGAGGAGGAAGGCGGCTGCGAACTGCGCGTGAAATTCAGCCGCAGCGCA |
| | | GATGCTCCAGCCTACAAGCAGGGGCAGAACCAGCTCTACAACGAACTCAAT |
| | | CTTGGTCGGAGAGAGGAGTACGACGTGCTGGACAAGCGGAGAGGACGGGAC |
| | | CCAGAAATGGGCGGGAAGCCGCGCAGAAAGAATCCCCAAGAGGGCCTGTAC |
| | | AACGAGCTCCAAAAGGATAAGATGGCAGAAGCCTATAGCGAGATTGGTATG |
| | | AAAGGGGAACGCAGAAGAGGCAAAGGCCACGACGGACTGTACCAGGGACTC |
| | | AGCACCGCCACCAAGGACACCTATGACGCTCTTCACATGCAGGCCCTGCCG |
| | | CCTCGG |

BCMA_EBB-C1978-G4

| | | |
|---|---|---|
| BCMA_EBB- | 999 | MALPVTALLLPLALLLHAARPEVQLVESGGGLVQPGGSLRLSCAASGFTFS |
| C1978-G4- | | SYAMSWVRQAPGKGLEWVSAISGSGGSTYYADSVKGRFTISRDNSKNTLYL |
| aa | | QMNSLRAEDTAVYYCAKMGWSSGYLGAFDIWGQGTTVTVSSGGGGSGGGGS |
| Full CART | | GGGGSEIVLTQSPGTLSLSPGERATLSCRASQSVASSFLAWYQQKPGQAPR |
| | | LLIYGASGRATGIPDRFSGSGSGTDFTLTISRLEPEDFAVYYCQHYGGSPR |
| | | LTFGGGTKVDIKTTTPAPRPPTPAPTIASQPLSLRPEACRPAAGGAVHTRG |
| | | LDFACDIYIWAPLAGTCGVLLLSLVITLYCKRGRKKLLYIFKQPFMRPVQT |
| | | TQEEDGCSCRFPEEEEGGCELRVKFSRSADAPAYKQGQNQLYNELNLGRRE |
| | | EYDVLDKRRGRDPEMGGKPRRKNPQEGLYNELQKDKMAEAYSEIGMKGERR |
| | | RGKGHDGLYQGLSTATKDTYDALHMQALPPR |
| BCMA_EBB- | 1021 | ATGGCCCTCCCTGTCACCGCCCTGCTGCTTCCGCTGGCTCTTCTGCTCCAC |
| C1978-G4- | | GCCGCTCGGCCCGAAGTCCAACTGGTGGAGTCCGGGGGAGGGCTCGTGCAG |
| nt | | CCCGGAGGCAGCCTTCGGCTGTCGTGCGCCGCCTCCGGGTTCACGTTCTCA |
| Full CART | | TCCTACGCGATGTCGTGGGTCAGACAGGCACCAGGAAAGGGACTGGAATGG |
| | | GTGTCCGCCATTAGCGGCTCCGGCGGTAGCACCTACTATGCCGACTCAGTG |
| | | AAGGGAAGGTTCACTATCTCCCGCGACAACAGCAAGAACACCCTGTACCTC |
| | | CAAATGAACTCTCTGCGGGCCGAGGATACCGCGGTGTACTATTGCGCCAAG |
| | | ATGGGTTGGTCCAGCGGATACTTGGGAGCCTTCGACATTTGGGGACAGGGC |
| | | ACTACTGTGACCGTGTCCTCCGGGGGTGGCGGATCGGGAGGCGGCGGCTCG |
| | | GGTGGAGGGGGTTCCGAAATCGTGTTGACCCAGTCACCGGGAACCCTCTCG |
| | | CTGTCCCCGGGAGAACGGGCTACACTGTCATGTAGAGCGTCCCAGTCCGTG |
| | | GCTTCCTCGTTCCTGGCCTGGTACCAGCAGAAGCCGGGACAGGCACCCCGC |
| | | CTGCTCATCTACGGAGCCAGCGGCCGGGCGACCGGCATCCCTGACCGCTTC |
| | | TCCGGTTCCGGCTCGGGCACCGACTTTACTCTGACCATTAGCAGGCTTGAG |
| | | CCCGAGGATTTTGCCGTGTACTACTGCCAACACTACGGGGGGAGCCCTCGC |
| | | CTGACCTTCGGAGGCGGAACTAAGGTCGATATCAAAACCACTACCCCAGCA |
| | | CCGAGGCCACCCACCCCGGCTCCTACCATCGCCTCCCAGCCTCTGTCCCTG |
| | | CGTCCGGAGGCATGTAGACCCGCAGCTGGTGGGGCCGTGCATACCCGGGGT |
| | | CTTGACTTCGCCTGCGATATCTACATTTGGGCCCCTCTGGCTGGTACTTGC |
| | | GGGGTCCTGCTGCTTTCACTCGTGATCACTCTTTACTGTAAGCGCGGTCGG |
| | | AAGAAGCTGCTGTACATCTTTAAGCAACCCTTCATGAGGCCTGTGCAGACT |
| | | ACTCAAGAGGAGGACGGCTGTTCATGCCGGTTCCCAGAGGAGGAGGAAGGC |
| | | GGCTGCGAACTGCGCGTGAAATTCAGCCGCAGCGCAGATGCTCCAGCCTAC |
| | | AAGCAGGGGCAGAACCAGCTCTACAACGAACTCAATCTTGGTCGGAGAGAG |
| | | GAGTACGACGTGCTGGACAAGCGGAGAGGACGGGACCCAGAAATGGGCGGG |
| | | AAGCCGCGCAGAAAGAATCCCCAAGAGGGCCTGTACAACGAGCTCCAAAAG |
| | | GATAAGATGGCAGAAGCCTATAGCGAGATTGGTATGAAAGGGGAACGCAGA |
| | | AGAGGCAAAGGCCACGACGGACTGTACCAGGGACTCAGCACCGCCACCAAG |
| | | GACACCTATGACGCTCTTCACATGCAGGCCCTGCCGCCTCGG |

[0422] In one embodiment, the CAR molecule comprises (e.g., consists of) an amino acid sequence provided in Table 29, or Table 1 of WO2016/014565, or as otherwise described herein. In one embodiment, the CAR molecule comprises (e.g., consists of) an amino acid sequence of SEQ ID NO: 949, SEQ ID NO: 950, SEQ ID NO: 951, SEQ ID NO: 952, SEQ ID NO: 953, SEQ ID NO: 954, SEQ ID NO: 955, SEQ ID NO: 956, SEQ ID NO: 957, SEQ ID NO: 958, SEQ ID NO: 959, SEQ ID NO: 960, SEQ ID NO: 961, SEQ ID NO: 962, SEQ ID NO: 963, SEQ ID NO: 979, SEQ ID NO: 980, SEQ ID NO: 981, SEQ ID NO: 982, SEQ ID NO: 983, SEQ ID NO: 984, SEQ ID NO: 985, SEQ ID NO: 986, SEQ ID NO: 987, SEQ ID NO: 988, SEQ ID NO: 989, SEQ ID NO: 990, SEQ ID NO: 991, SEQ ID NO: 992, SEQ ID NO: 993, SEQ ID NO: 994, SEQ ID NO: 995, SEQ ID NO: 996, SEQ ID NO: 997, SEQ ID NO: 998, or SEQ ID NO: 999; or an amino acid sequence having at least one, two, three, four, five, 10, 15, 20 or 30 modifications (e.g., substitutions, e.g., conservative substitutions) but not more than 60, 50, or 40 modifications (e.g., substitutions, e.g., conservative substitutions) of an amino acid sequence of SEQ ID NO: 949, SEQ ID NO: 950, SEQ ID NO: 951, SEQ ID NO: 952, SEQ ID NO: 953, SEQ ID NO: 954, SEQ ID NO: 955, SEQ ID NO: 956, SEQ ID NO: 957, SEQ ID NO: 958, SEQ ID NO: 959, SEQ ID NO: 960, SEQ ID NO: 961, SEQ ID NO: 962, SEQ ID NO: 963, SEQ ID NO: 979, SEQ ID NO: 980, SEQ ID NO: 981, SEQ ID NO: 982, SEQ ID NO: 983, SEQ ID NO: 984, SEQ ID NO: 985, SEQ ID NO: 986, SEQ ID NO: 987, SEQ ID NO: 988, SEQ ID NO: 989, SEQ ID NO: 990, SEQ ID NO: 991, SEQ ID NO: 992, SEQ ID NO: 993, SEQ ID NO: 994, SEQ ID NO: 995, SEQ ID NO: 996, SEQ ID NO: 997, SEQ ID NO: 998, or SEQ ID NO: 999; or an amino acid sequence having 85%, 90%, 95%, 96%, 97%, 98%, 99% identity to an amino acid sequence of SEQ ID NO: 949, SEQ ID NO: 950, SEQ ID NO: 951, SEQ ID NO: 952, SEQ ID NO: 953, SEQ ID NO: 954, SEQ ID NO: 955, SEQ ID NO: 956, SEQ ID NO: 957, SEQ ID NO: 958, SEQ ID NO: 959, SEQ ID NO: 960, SEQ ID NO: 961, SEQ ID NO: 962, SEQ ID NO: 963, SEQ ID NO: 979, SEQ ID NO: 980, SEQ ID NO: 981, SEQ ID NO: 982, SEQ ID NO: 983, SEQ ID NO: 984, SEQ ID NO: 985, SEQ ID NO: 986, SEQ ID NO: 987, SEQ ID NO: 988, SEQ ID NO: 989, SEQ ID NO: 990, SEQ ID NO: 991, SEQ ID NO: 992, SEQ ID NO: 993, SEQ ID NO: 994, SEQ ID NO: 995, SEQ ID NO: 996, SEQ ID NO: 997, SEQ ID NO: 998, or SEQ ID NO: 999.

[0423] Exemplary CAR molecules that target mesothelin are described herein, and are provided in Table 11. The CAR molecules in Table 11 comprise a mesothelin antigen binding domain, e.g., an amino acid sequence of any mesothelin antigen binding domain provided in Table 2. The leader sequence is in bold and underlined, CDRs are underlined, and the linker sequence between the heavy and light chain of the antigen binding region is shaded in grey.

TABLE 11
Exemplary mesothelin CAR molecules

| | | SEQ |
|---|---|---|
| | | ID |
| Name | Amino Acid Sequence | NO: |
| M5 CAR | [chemical structure] | 286 |
| M11 CAR | [chemical structure] | 292 |
| SS1 CAR | [chemical structure] | 306 |
| M1 CAR | [chemical structure] | 282 |
| M2 CAR | [chemical structure] | 283 |
| M3 CAR | [chemical structure] | 284 |
| M4 CAR | [chemical structure] | 285 |
| M6 CAR | [chemical structure] | 287 |
| M7 CAR | [chemical structure] | 288 |
| M8 CAR | [chemical structure] | 289 |
| M9 CAR | [chemical structure] | 290 |
| M10 CAR | [chemical structure] | 291 |
| M12 CAR | [chemical structure] | 293 |
| M13 CAR | [chemical structure] | 294 |
| M14 CAR | [chemical structure] | 295 |
| M15 CAR | [chemical structure] | 296 |
| M16 CAR | [chemical structure] | 297 |
| M17 CAR | [chemical structure] | 298 |
| M18 CAR | [chemical structure] | 299 |
| M19 CAR | [chemical structure] | 300 |
| M20 CAR | [chemical structure] | 301 |
| M21 CAR | [chemical structure] | 302 |
| M22 CAR | [chemical structure] | 303 |
| M23 CAR | [chemical structure] | 304 |
| M24 CAR | [chemical structure] | 305 |

[0424] In one embodiment, the cell of the invention comprises a CAR molecule that binds mesothelin, and comprises (e.g., consists of) an amino acid sequence as provided in Table 11 and Table 2 of International Publication No. WO2015/090230, filed Dec. 19, 2014; incorporated herein by reference. In one embodiment, the CAR molecule comprises (e.g., consists of) an amino acid sequence of SEQ ID NO: 282, SEQ ID NO: 283, SEQ ID NO: 284, SEQ ID NO: 285, SEQ ID NO: 286, SEQ ID NO: 287, SEQ ID NO: 288, SEQ ID NO: 289, SEQ ID NO: 290, SEQ ID NO: 291, SEQ ID NO: 292, SEQ ID NO: 293, SEQ ID NO: 294, SEQ ID NO: 295, SEQ ID NO: 296, SEQ ID NO: 297, SEQ ID NO: 298, SEQ ID NO: 299, SEQ ID NO: 300, SEQ ID NO: 301, SEQ ID NO: 302, SEQ ID NO: 303, SEQ ID NO: 304, SEQ ID NO: 305, or SEQ ID NO: 306; or an amino acid sequence having at least one, two, three, four, five, 10, 15, 20 or 30 modifications (e.g., substitutions, e.g., conservative substitutions) but not more than 60, 50, or 40 modifications (e.g., substitutions, e.g., conservative substitutions) of an amino acid sequence of SEQ ID NO: 282, SEQ ID NO: 283, SEQ ID NO: 284, SEQ ID NO: 285, SEQ ID NO: 286, SEQ ID NO: 287, SEQ ID NO: 288, SEQ ID NO: 289, SEQ ID NO: 290, SEQ ID NO: 291, SEQ ID NO: 292, SEQ ID NO: 293, SEQ ID NO: 294, SEQ ID NO: 295, SEQ ID NO: 296, SEQ ID NO: 297, SEQ ID NO: 298, SEQ ID NO: 299, SEQ ID NO: 300, SEQ ID NO: 301, SEQ ID NO: 302, SEQ ID NO: 303, SEQ ID NO: 304, SEQ ID NO: 305, or SEQ ID NO: 306; or an amino acid sequence having 85%, 90%, 95%, 96%, 97%, 98%, 99% identity to an amino acid sequence of SEQ ID NO: 282, SEQ ID NO: 283, SEQ ID NO: 284, SEQ ID NO: 285, SEQ ID NO: 286, SEQ ID NO: 287, SEQ ID NO: 288, SEQ ID NO: 289, SEQ ID NO: 290, SEQ ID NO: 291, SEQ ID NO: 292, SEQ ID NO: 293, SEQ ID NO: 294, SEQ ID NO: 295, SEQ ID NO: 296, SEQ ID NO: 297, SEQ ID NO: 298, SEQ ID NO: 299, SEQ ID NO: 300, SEQ ID NO: 301, SEQ ID NO: 302, SEQ ID NO: 303, SEQ ID NO: 304, SEQ ID NO: 305, or SEQ ID NO: 306.

[0425] In one aspect, the cell of the invention comprises a CAR molecule comprising an antigen binding domain that binds to a tumor antigen. In one embodiment, the CAR comprises a EGFRvIII antigen binding domain (e.g., a murine, human or humanized antibody or antibody fragment that specifically binds to mesothelin), a transmembrane domain, and an intracellular signaling domain (e.g., an intracellular signaling domain comprising a costimulatory domain and/or a primary signaling domain).

[0426] Exemplary CAR molecules that target EGFRvIII are described herein, and are provided in Table 30, or in Table 2 of WO/2014/130657 or as described in WO2016/014789.

TABLE 30
Humanized EGFRvIII CAR Constructs. Sequences are provided with a leader, and
the CDRs are underlined. Nt stands for nucleic acid and aa stands for amino acid

| | | |
|---|---|---|
| | SEQ ID | |
| Name | NO: | Sequence |

CAR 1

| | | |
|---|---|---|
| CAR 1- | 1042 | atggccctccctgtcaccgccctgctgcttccgctggctcttctgctccacgccgctcggcccgagatcc |
| Full-nt | | agctggtgcagtcgggagctgaagtcaaaaagcctggcgcaaccgtcaagatctcgtgcaaaggatc |
| | | agggttcaacatcgaggactactacatccattgggtgcaacaggcacccggaaaaggcctggagtgg |
| | | atggggaggattgacccagaaaatgacgaaaccaagtacggaccgatcttccaaggacgggtgacca |
| | | tcacggctgacacttccactaacaccgtctacatggaactctcgagccttcgctcggaagataccgcgg |
| | | tgtactactgcgcctttagaggtggagtctactggggacaagggactaccgtcaccgtgtcgtcaggtg |
| | | gcggaggatcaggcggaggcggctccggtggaggaggaagcggaggaggtggctccgacgtggt |
| | | gatgacgcagtcaccggactccttggcggtgagcctgggtgaacgcgccactatcaactgcaagagct |
| | | cccagagcttgctggactccgatggaaagacttatctcaattggctgcaacagaagcctggccagccg |
| | | ccaaagagactcatctcactggtgagcaagctggatagcggagtgccagatcggttttcgggatcggg |
| | | ctcaggcaccgacttcaccctgactatttcctccctccaagccgaggatgtggccgtctactactgttggc |
| | | aggggactcacttcccggggaccttcggtggaggcactaaggtggagatcaaaaccactaccccagc |
| | | accgaggccacccaccccggctcctaccatcgcctcccagcctctgtccctgcgtccggaggcatgta |
| | | gacccgcagctggtggggccgtgcatacccggggtcttgacttcgcctgcgatatctacatttgggccc |
| | | ctctggctggtacttgcggggtcctgctgctttcactcgtgatcactctttactgtaagcgcggtcggaag |
| | | aagctgctgtacatctttaagcaacccttcatgaggcctgtgcagactactcaagaggaggacggctgtt |
| | | catgccggttcccagaggaggaggaaggcggctgcgaactgcgcgtgaaattcagccgcagcgcag |
| | | atgctccagcctacaagcaggggcagaaccagctctacaacgaactcaatcttggtcggagagagga |
| | | gtacgacgtgctggacaagcggagaggacgggacccagaaatgggcgggaagccgcgcagaaag |
| | | aatccccaagagggcctgtacaacgagctccaaaaggataagatggcagaagcctatagcgagattg |
| | | gtatgaaaggggaacgcagaagaggcaaaggccacgacggactgtaccagggactcagcaccgcc |
| | | accaaggacacctatgacgctcttcacatgcaggccctgccgcctcgg |
| CAR 1- | 1043 | malpvtalllplalllhaarpeiqlvqsgaevkkpgatvkisckgsgfniedyyihwvqqapgkgle |
| Full-aa | | wmgridpendetkygpifqgrvtitadtstntvymelsslrsedtavyycafrggvywgqgttvt |
| | | vssggggsggggsggggsggggsdvvmtqspdslavslgeratinckssqslldsdgktylnwlq |
| | | qkpgqppkrlislvskldsgvpdrfsgsgsgtdftltisslqaedvavyycwqgthfpgtfgggtkv |
| | | eiktttpaprpptpaptiasqplslrpeacrpaaggavhtrgldfacdiyiwaplagtcgvlllslvitlyc |
| | | krgrkkllyifkqpfmrpvqttqeedgcscrfpeeeeggcelrvkfsrsadapaykqgqnqlyneln |
| | | lgrreeydvldkrrgrdpemggkprrknpqeglynelqkdkmaeayseigmkgerrrgkghdgl |
| | | yqglstatkdtydalhmqalppr |

CAR 2

| | | |
|---|---|---|
| CAR 2- | 1048 | atggccctccctgtcaccgccctgctgcttccgctggctcttctgctccacgccgctcggcccgacgtg |
| Full-nt | | gtcatgactcaaagcccagattccttggctgtctcccttggagaaagagcaacgatcaattgcaaaagct |
| | | cgcagtccctgttggactccgatggaaaaacctacctcaactggctgcagcagaagccgggacaacc |
| | | accaaagcggctgatttccctcgtgtccaagctggacagcggcgtgccggatcgcttctcgggcagcg |
| | | gctcgggaaccgattttactctcactatttcgtcactgcaagcggaggacgtggcggtgtattactgctgg |
| | | cagggcactcacttcccgggtacttttggtggaggtaccaaagtcgaaatcaagggtggaggcggga |
| | | gcggaggaggcgggtcgggaggaggaggatcgggtggcggaggctcagaaatccagctggtgca |
| | | gtcaggtgccgaagtgaagaagcctggggccacggtgaagatctcgtgcaaggggagcggattcaa |
| | | catcgaggattactacatccattgggtgcaacaggcccctggcaaagggctggaatggatgggaagg |
| | | atcgaccccgagaatgacgagactaagtacggcccgatcttccaaggacgggtgaccatcactgcag |
| | | acacttcaaccaacaccgtctacatggaactctcctcgctgcgctccgaggacaccgccgtgtactact |
| | | gtgctttcagaggaggagtctactggggacagggaacgaccgtgaccgtcagctcaaccactacccc |
| | | agcaccgaggccacccaccccggctcctaccatcgcctcccagcctctgtccctgcgtccggaggcat |
| | | gtagacccgcagctggtggggccgtgcatacccggggtcttgacttcgcctgcgatatctacatttggg |
| | | cccctctggctggtacttgcggggtcctgctgctttcactcgtgatcactctttactgtaagcgcggtcgg |
| | | aagaagctgctgtacatctttaagcaacccttcatgaggcctgtgcagactactcaagaggaggacggc |
| | | tgttcatgccggttcccagaggaggaggaaggcggctgcgaactgcgcgtgaaattcagccgcagcg |
| | | cagatgctccagcctacaagcaggggcagaaccagctctacaacgaactcaatcttggtcggagaga |
| | | ggagtacgacgtgctggacaagcggagaggacgggacccagaaatgggcgggaagccgcgcaga |
| | | aagaatccccaagagggcctgtacaacgagctccaaaaggataagatggcagaagcctatagcgag |
| | | attggtatgaaaggggaacgcagaagaggcaaaggccacgacggactgtaccagggactcagcacc |
| | | gccaccaaggacacctatgacgctcttcacatgcaggccctgccgcctcgg |
| CAR 2- | 1049 | malpvtalllplalllhaarpdvvmtqspdslavslgeratinckssqslldsdgktylnwlqqkpgq |
| Full-aa | | ppkrlislvskldsgvpdrfsgsgsgtdftltisslqaedvavyycwqgthfpgtfgggtkveikggg |
| | | gsggggsggggsggggseiqlvqsgaevkkpgatvkisckgsgfniedyyihwvqqapgkgle |
| | | wmgridpendetkygpifqgrvtitadtstntvymelsslrsedtavyycafrggvywgqgttvt |
| | | vsstttpaprpptpaptiasqplslrpeacrpaaggavhtrgldfacdiyiwaplagtcgvlllslvitlyc |
| | | krgrkkllyifkqpfmrpvqttqeedgcscrfpeeeeggcelrvkfsrsadapaykqgqnqlyneln |
| | | lgrreeydvldkrrgrdpemggkprrknpqeglynelqkdkmaeayseigmkgerrrgkghdgl |
| | | yqglstatkdtydalhmqalppr |

CAR 3

| | | |
|---|---|---|
| CAR 3- | 1054 | atggccctccctgtcaccgccctgctgcttccgctggctcttctgctccacgccgctcggcccgaaatcc |
| Full-nt | | agctggtgcaaagcggagccgaggtgaagaagcccggagaatccctgcgcatctcgtgtaagggttc |
| | | cggctttaacatcgaggattactacatccactgggtgagacagatgccgggcaaaggtctggaatggat |
| | | gggccgcatcgacccggagaacgacgaaaccaaatacggaccaatcttccaaggacatgtgactattt |
| | | ccgcggatacctccatcaacactgtctacttgcagtggagctcgctcaaggcgtcggataccgccatgt |
| | | actactgcgcattcagaggaggtgtgtactggggccagggcactacggtcaccgtgtcctcgggaggt |
| | | ggagggtcaggaggcggaggctcgggcggtggaggatcaggcggaggaggaagcgatgtggtca |
| | | tgactcaatccccactgtcactgcctgtcactctggggcaaccggcttccatctcatgcaagtcaagcca |
| | | atcgctgctcgactccgacggaaaaacctacctcaattggcttcagcagcgcccaggccagtcgcctc |
| | | ggaggctgatctcactcgtgtcgaagcttgactccggggtgccggatcggtttagcggaagcggatcg |
| | | gggaccgacttcacgttgaagattagccgggtggaagccgaggacgtgggagtctattactgctggca |
| | | ggggacccacttcccggggactttcggaggaggcaccaaagtcgagattaagaccactaccccagca |
| | | ccgaggccacccaccccggctcctaccatcgcctcccagcctctgtccctgcgtccggaggcatgtag |
| | | acccgcagctggtggggccgtgcatacccggggtcttgacttcgcctgcgatatctacatttgggcccc |
| | | tctggctggtacttgcggggtcctgctgctttcactcgtgatcactctttactgtaagcgcggtcggaaga |
| | | agctgctgtacatctttaagcaacccttcatgaggcctgtgcagactactcaagaggaggacggctgttc |
| | | atgccggttcccagaggaggaggaaggcggctgcgaactgcgcgtgaaattcagccgcagcgcaga |
| | | tgctccagcctacaagcaggggcagaaccagctctacaacgaactcaatcttggtcggagagaggag |
| | | tacgacgtgctggacaagcggagaggacgggacccagaaatgggcgggaagccgcgcagaaaga |
| | | atccccaagagggcctgtacaacgagctccaaaaggataagatggcagaagcctatagcgagattgg |
| | | tatgaaaggggaacgcagaagaggcaaaggccacgacggactgtaccagggactcagcaccgcca |
| | | ccaaggacacctatgacgctcttcacatgcaggccctgccgcctcgg |
| CAR 3- | 1055 | malpvtalllplalllhaarpeiqlvqsgaevkkpgeslrisckgsgfniedyyihwvrqmpgkgle |
| Full-aa | | wmgridpendetkygpifqghvtisadtsintvylqwsslkasdtamyycafrggyywgqgttv |
| | | tvssggggsggggsggggsggggsdvvmtqsplslpvtlgqpasisckssqslldsdgkylnwl |
| | | qqrpgqsprrlislvskldsgvpdrfsgsgsgtdftlkisrveaedvgvyycwqgthfpgtfgggtk |
| | | veiktttpaprpptpaptiasqplslrpeacrpaaggavhtrgldfacdiyiwaplagtcgvlllslvitly |
| | | ckgrkkllyifkqpfmrpvqttqeedgcscrfpeeeeggcelrvkfsrsadapaykqgqnqlynel |
| | | nlgrreeydvldkrrgrdpemggkprrknpqeglynelqkdkmaeayseigmkgerrrgkghdg |
| | | lyqglstatkdtydalhmqalppr |

CAR 4

| | | |
|---|---|---|
| CAR 4- | 1060 | atggccctccctgtcaccgccctgctgcttccgctggctcttctgctccacgccgctcggcccgacgtcg |
| Full-nt | | tcatgacccaatcccctctctccctgccggtcaccctgggtcagccggcgtcgatctcatgcaaaagctc |
| | | acagtccctgctggattcggacggaaaaacctacttgaactggctccaacagaggccgggtcagtccc |
| | | ctcgcagactgatctcgctggtgagcaagctcgactcgggtgtgccggatcggttctccgggtcaggat |
| | | cgggcaccgactttacgctcaagatttcgagagtggaggccgaggatgtgggagtgtactattgctggc |
| | | agggcacgcatttccccgggacctttggaggcgggactaaggtggaaatcaagggaggtggcggat |
| | | caggcggaggaggcagcggcggaggtggatcaggaggcggagggtcagagatccagctggtcca |
| | | aagcggagcagaggtgaagaagccaggcgagtcccttcgcatttcgtgcaaagggagcggcttcaac |
| | | attgaagattactacatccactgggtgcggcaaatgccaggaaagggtctggaatggatgggacggat |
| | | cgacccagaaaatgatgaaactaagtacggaccgatcttccaaggacacgtcactatctccgcggaca |
| | | cttcgatcaacaccgtgtacctccagtggagcagcttgaaagcctccgacaccgctatgtactactgtgc |
| | | cttccgcggaggagtctactggggacaggggactactgtgaccgtgtcgtccaccactaccccagcac |
| | | cgaggccacccaccccggctcctaccatcgcctcccagcctctgtccctgcgtccggaggcatgtaga |
| | | cccgcagctggtggggccgtgcatacccggggtcttgacttcgcctgcgatatctacatttgggcccct |
| | | ctggctggtacttgcggggtcctgctgctttcactcgtgatcactctttactgtaagcgcggtcggaagaa |
| | | gctgctgtacatctttaagcaacccttcatgaggcctgtgcagactactcaagaggaggacggctgttca |
| | | tgccggttcccagaggaggaggaaggcggctgcgaactgcgcgtgaaattcagccgcagcgcagat |
| | | gctccagcctacaagcaggggcagaaccagctctacaacgaactcaatcttggtcggagagaggagt |
| | | acgacgtgctggacaagcggagaggacgggacccagaaatgggcgggaagccgcgcagaaagaa |
| | | tccccaagagggcctgtacaacgagctccaaaaggataagatggcagaagcctatagcgagattggt |
| | | atgaaaggggaacgcagaagaggcaaaggccacgacggactgtaccagggactcagcaccgccac |
| | | caaggacacctatgacgctcttcacatgcaggccctgccgcctcgg |
| CAR 4- | 1061 | malpvtalllplalllhaarpdvvmtqsplslpvtlgqpasisckssqslldsdgktvlnwlqqrpgq |
| Full-aa | | sprrlislvskldsgvpdrfsgsgsgtdftlkisrveaedvgvyycwqgthfpgtfgggtkveikgg |
| | | ggsggggsggggsggggseiqlvqsgaevkkpgeslrisckgsgfniedyyihwvrqmpgkgle |
| | | wmgridpendetkygpifqghvtisadtsintvylqwsslkasdtamyycafrggvywgqgttv |
| | | tvsstttpaprpptpaptiasqplslrpeacrpaaggavhtrgldfacdiyiwaplagtcgvlllslvitly |
| | | ckrgrkkllyifkqpfmrpvqttqeedgcscrfpeeeeggcelrvkfsrsadapaykqgqnqlynel |
| | | nlgrreeydvldkrrgrdpemggkprrknpqeglynelqkdkmaeayseigmkgerrrgkghdg |
| | | lyqglstatkdtydalhmqalppr |

CAR 5

| | | |
|---|---|---|
| CAR 5- | 1066 | atggccctccctgtcaccgccctgctgcttccgctggctcttctgctccacgccgctcggcccgaaatcc |
| Full-nt | | agctcgtgcagagcggagccgaggtcaagaaaccgggtgctaccgtgaagatttcatgcaagggatc |
| | | gggcttcaacatcgaggattactacatccactgggtgcagcaggcaccaggaaaaggacttgaatgga |
| | | tgggccggatcgacccggaaaatgacgagactaagtacggccctatcttccaaggacgggtgacgat |
| | | caccgcagacactagcaccaacaccgtctatatggaactctcgtccctgaggtccgaagatactgccgt |
| | | gtactactgtgcgtttcgcggaggtgtgtactggggacagggtaccaccgtcaccgtgtcatcgggcg |
| | | gtggaggctccggtggaggagggtcaggaggcggtggaagcggaggaggcggcagcgacgtggt |
| | | catgactcaatcgccgctgtcgctgcccgtcactctgggacaacccgcgtccatcagctgcaaatcctc |
| | | gcagtcactgcttgactccgatggaaagacctacctcaactggctgcagcaacgcccaggccaatccc |
| | | caagacgcctgatctcgttggtgtcaaagctggactcaggggtgccggaccggttctccgggagcgg |
| | | gtcgggcacggatttcactctcaagatctccagagtggaagccgaggatgtgggagtctactactgctg |
| | | gcagggaacccatttccctggaacttttggcggaggaactaaggtcgagattaaaaccactaccccag |
| | | caccgaggccacccaccccggctcctaccatcgcctcccagcctctgtccctgcgtccggaggcatgt |
| | | agacccgcagctggtggggccgtgcatacccggggtcttgacttcgcctgcgatatctacatttgggcc |
| | | cctctggctggtacttgcggggtcctgctgctttcactcgtgatcactctttactgtaagcgcggtcggaa |
| | | gaagctgctgtacatctttaagcaacccttcatgaggcctgtgcagactactcaagaggaggacggctg |
| | | ttcatgccggttcccagaggaggaggaaggcggctgcgaactgcgcgtgaaattcagccgcagcgc |
| | | agatgctccagcctacaagcaggggcagaaccagctctacaacgaactcaatcttggtcggagagag |
| | | gagtacgacgtgctggacaagcggagaggacgggacccagaaatgggcgggaagccgcgcagaa |
| | | agaatccccaagagggcctgtacaacgagctccaaaaggataagatggcagaagcctatagcgagat |
| | | tggtatgaaaggggaacgcagaagaggcaaaggccacgacggactgtaccagggactcagcaccg |
| | | ccaccaaggacacctatgacgctcttcacatgcaggccctgccgcctcgg |
| CAR 5- | 1067 | malpvtalllplalllhaarpeiqlvqsgacvkkpgatvkisckgsgfniedyyihwvqqapgkgle |
| Full-aa | | wmgridpendetkygpifqgrvtitadtstntvymelsslrsedtavyycafrggvywgqgttvt |
| | | vssggggsggggsggggsggggsdvvmtqsplslpvtlgqpasisckssqslldsdgktylnwlq |
| | | qrpgqsprrlislvskldsgvpdrfsgsgsgtdftlkisrveaedvgvyycwqgthfpgtfgggtkv |
| | | eiktttpaprpptpaptiasqplslrpeacrpaaggavhtrgldfacdiyiwaplagtcgvlllslvitlyc |
| | | krgrkkllyifkqpfmrpvqttqeedgcscrfpeeeeggcelrvkfsrsadapaykqgqnqlyneln |
| | | lgrreeydvldkrrgrdpemggkprrknpqeglynelqkdkmaeayseigmkgerrrgkghdgl |
| | | yqglstatkdtydalhmqalppr |

CAR 6

| | | |
|---|---|---|
| CAR6- | 1072 | atggccctccctgtcaccgccctgctgcttccgctggctcttctgctccacgccgctcggcccgagattc |
| Full-nt | | agctcgtgcaatcgggagcggaagtcaagaagccaggagagtccttgcggatctcatgcaagggtag |
| | | cggctttaacatcgaggattactacatccactgggtgaggcagatgccggggaagggactcgaatgga |
| | | tgggacggatcgacccagaaaacgacgaaactaagtacggtccgatcttccaaggccatgtgactatt |
| | | agcgccgatacttcaatcaataccgtgtatctgcaatggtcctcattgaaagcctcagataccgcgatgta |
| | | ctactgtgctttcagaggaggggtctactggggacagggaactaccgtgactgtctcgtccggcggag |
| | | gcgggtcaggaggtggcggcagcggaggaggagggtccggcggaggtgggtccgacgtcgtgat |
| | | gacccagagccctgacagcctggcagtgagcctgggcgaaagagctaccattaactgcaaatcgtcg |
| | | cagagcctgctggactcggacggaaaaacgtacctcaattggctgcagcaaaagcctggccagccac |
| | | cgaagcgccttatctcactggtgtcgaagctggattcgggagtgcccgatcgcttctccggctcgggat |
| | | cgggtactgacttcaccctcactatctcctcgcttcaagcagaggacgtggccgtctactactgctggca |
| | | gggaacccactttccgggaaccttcggcggagggacgaaagtggagatcaagaccactaccccagc |
| | | accgaggccacccaccccggctcctaccatcgcctcccagcctctgtccctgcgtccggaggcatgta |
| | | gacccgcagctggtggggccgtgcatacccggggtcttgacttcgcctgcgatatctacatttgggccc |
| | | ctctggctggtacttgcggggtcctgctgctttcactcgtgatcactctttactgtaagcgcggtcggaag |
| | | aagctgctgtacatctttaagcaacccttcatgaggcctgtgcagactactcaagaggaggacggctgtt |
| | | catgccggttcccagaggaggaggaaggcggctgcgaactgcgcgtgaaattcagccgcagcgcag |
| | | atgctccagcctacaagcaggggcagaaccagctctacaacgaactcaatcttggtcggagagagga |
| | | gtacgacgtgctggacaagcggagaggacgggacccagaaatgggcgggaagccgcgcagaaag |
| | | aatccccaagagggcctgtacaacgagctccaaaaggataagatggcagaagcctatagcgagattg |
| | | gtatgaaaggggaacgcagaagaggcaaaggccacgacggactgtaccagggactcagcaccgcc |
| | | accaaggacacctatgacgctcttcacatgcaggccctgccgcctcgg |
| CAR6- | 1073 | malpvtalllplalllhaarpeiqlvqsgaevkkpgeslrisckgsgfniedyyihwvrqmpgkgle |
| Full-aa | | wmgridpendetkygpifqghvtisadtsintvylqwsslkasdtamyycafrggvywgqgttv |
| | | tvssggggsggggsggggsggggsdvvmtqspdslavslgeratinckssqslldsdgktylnwl |
| | | qqkpgqppkrlislvskldsgvpdrfsgsgsgtdftltisslqaedvavyycwqgthfpgtfgggtk |
| | | veiktttpaprpptpaptiasqplslrpeacrpaaggavhtrgldfacdiyiwaplagtcgvlllslvitly |
| | | ckrgrkkllyifkqpfmrpvqttqeedgcscrfpeeeeggcelrvkfsrsadapaykqgqnqlynel |
| | | nlgrreeydvldkrrgrdpemggkprrknpqeglynelqkdkmaeayseigmkgerrrgkghdg |
| | | lyqglstatkdtydalhmqalppr |

CAR 7

| | | |
|---|---|---|
| CAR 7 | 1078 | atggccctccctgtcaccgccctgctgcttccgctggctcttctgctccacgccgctcggcccgacgtg |
| Full-nt | | gtgatgactcagtcgcctgactcgctggctgtgtcccttggagagcgggccactatcaattgcaagtcat |
| | | cccagtcgctgctggattccgacgggaaaacctacctcaattggctgcagcaaaaaccgggacagcct |
| | | ccaaagcggctcatcagcctggtgtccaagttggacagcggcgtgccagaccgcttctccggttcggg |
| | | aagcggtactgatttcacgctgaccatctcatccctccaagcggaggatgtggcagtctactactgttgg |
| | | cagggcacgcattttccgggcacttttggaggagggaccaaggtcgaaatcaagggaggaggtggct |
| | | cgggcggaggaggctcgggaggaggaggatcaggaggcggtggaagcgagattcaactggtcca |
| | | gagcggcgcagaagtcaagaagccgggtgaatcgctcagaatctcgtgcaaaggatcgggattcaac |
| | | atcgaggactactacattcactgggtcagacaaatgccgggcaaagggctggaatggatggggagga |
| | | tcgaccccgaaaacgatgaaaccaagtacggaccaatcttccaagggcacgtgaccatttcggcgga |
| | | cacctcaatcaacactgtgtacctccagtggagctcacttaaggccagcgataccgccatgtactattgc |
| | | gctttccgcggaggggtgtactggggacagggcactactgtgaccgtgtcatccaccactaccccagc |
| | | accgaggccacccaccccggctcctaccatcgcctcccagcctctgtccctgcgtccggaggcatgta |
| | | gacccgcagctggtggggccgtgcatacccggggtcttgacttcgcctgcgatatctacatttgggccc |
| | | ctctggctggtacttgcggggtcctgctgctttcactcgtgatcactctttactgtaagcgcggtcggaag |
| | | aagctgctgtacatctttaagcaacccttcatgaggcctgtgcagactactcaagaggaggacggctgtt |
| | | catgccggttcccagaggaggaggaaggcggctgcgaactgcgcgtgaaattcagccgcagcgcag |
| | | atgctccagcctacaagcaggggcagaaccagctctacaacgaactcaatcttggtcggagagagga |
| | | gtacgacgtgctggacaagcggagaggacgggacccagaaatgggcgggaagccgcgcagaaag |
| | | aatccccaagagggcctgtacaacgagctccaaaaggataagatggcagaagcctatagcgagattg |
| | | gtatgaaaggggaacgcagaagaggcaaaggccacgacggactgtaccagggactcagcaccgcc |
| | | accaaggacacctatgacgctcttcacatgcaggccctgccgcctcgg |
| CAR 7 | 1079 | malpvtalllplalllhaarpdvvmtqspdslavslgeratinckssqslldsdgktvlnwlqqkpgq |
| Full-aa | | ppkrlislvskldsgvpdrfsgsgsgtdftltisslqaedvavyycwqgthfpgtfgggtkveikggg |
| | | gsggggsggggsggggseiqlvqsgaevkkpgeslrisckgsgfniedyyihwvrqmpgkgle |
| | | wmgridpendetkygpifqghvtisadtsintvylqwsslkasdtamyycafrggvywgqgttv |
| | | tvsstttpaprpptpaptiasqplslrpeacrpaaggavhtrgldfacdiyiwaplagtcgvlllslvitly |
| | | ckrgrkkllyifkqpfmrpvqttqeedgcscrfpeeeeggcelrvkfsrsadapaykqgqnqlynel |
| | | nlgrreeydvldkrrgrdpemggkprrknpqeglynelqkdkmaeayseigmkgerrrgkghdg |
| | | lyqglstatkdtydalhmqalppr |

CAR 8

| | | |
|---|---|---|
| CAR 8- | 1084 | atggccctccctgtcaccgccctgctgcttccgctggctcttctgctccacgccgctcggcccgatgtgg |
| Full-nt | | tcatgacgcagtcaccactgtccctccccgtgacccttggacagccagcgtcgattagctgcaagtcat |
| | | cccaatccctgctcgattcggatggaaagacctatctcaactggctgcagcaaagacccggtcagagc |
| | | cctaggagactcatctcgttggtgtcaaagctggacagcggagtgccggaccggttttccggttcggga |
| | | tcggggacggacttcactctgaagatttcacgggtggaagctgaggatgtgggagtgtactactgctgg |
| | | cagggaacccatttccctggcacttttggcggaggaactaaggtcgaaatcaagggaggaggtggctc |
| | | gggaggaggcggatcgggcggaggcgggagcggcggaggagggtccgaaatccaacttgtccag |
| | | tcaggagccgaagtgaagaaaccgggagccaccgtcaaaatcagctgtaagggatcgggattcaata |
| | | tcgaggactactacatccactgggtgcagcaagctccgggcaaaggactggagtggatggggcgcat |
| | | cgacccagagaacgacgaaaccaaatacggcccgatcttccaagggcgggtgaccatcaccgcgga |
| | | cacctcaactaacactgtgtacatggagctgagctccctgcgctccgaagatactgcagtctactactgc |
| | | gccttccgcggtggtgtgtactggggacagggcaccactgtgactgtcagctcgaccactaccccagc |
| | | accgaggccacccaccccggctcctaccatcgcctcccagcctctgtccctgcgtccggaggcatgta |
| | | gacccgcagctggtggggccgtgcatacccggggtcttgacttcgcctgcgatatctacatttgggccc |
| | | ctctggctggtacttgcggggtcctgctgctttcactcgtgatcactctttactgtaagcgcggtcggaag |
| | | aagctgctgtacatctttaagcaacccttcatgaggcctgtgcagactactcaagaggaggacggctgtt |
| | | catgccggttcccagaggaggaggaaggcggctgcgaactgcgcgtgaaattcagccgcagcgcag |
| | | atgctccagcctacaagcaggggcagaaccagctctacaacgaactcaatcttggtcggagagagga |
| | | gtacgacgtgctggacaagcggagaggacgggacccagaaatgggcgggaagccgcgcagaaag |
| | | aatccccaagagggcctgtacaacgagctccaaaaggataagatggcagaagcctatagcgagattg |
| | | gtatgaaaggggaacgcagaagaggcaaaggccacgacggactgtaccagggactcagcaccgcc |
| | | accaaggacacctatgacgctcttcacatgcaggccctgccgcctcgg |
| CAR 8- | 1085 | malpvtalllplalllhaarpdvvmtqsplslpvtlgqpasisckssqslldsdgktylnwlqqrpgq |
| Full-aa | | sprrlislvskldsgvpdrfsgsgsgtdftlkisrveaedvgvyycwqgthfpgtfgggtkveikgg |
| | | ggsggggsggggsggggseiqlvqsgaevkkpgatvkisckgsgfniedyyihwvqqapgkgle |
| | | wmgridpendetkygpifqgrvtitadtstntvymelsslrsedtavyycafrggyywgqgttvt |
| | | vsstttpaprpptpaptiasqplslrpeacrpaaggavhtrgldfacdiyiwaplagtcgvlllslvitlyc |
| | | krgrkkllyifkqpfmrpvqttqeedgcscrfpeeeeggcelrvkfsrsadapaykqgqnqlyneln |
| | | lgrreeydvldkrrgrdpemggkprrknpqeglynelqkdkmaeayseigmkgerrrgkghdgl |
| | | yqglstatkdtydalhmqalppr |

CAR 9 Mouse anti-EGFRvIII clone 3C10

| | | |
|---|---|---|
| CAR 9- | 1089 | atggccctccctgtcaccgccctgctgcttccgctggctcttctgctccacgccgctcggcccgagatcc |
| Full-nt | | agctccaacagagcggagccgaactggtcaaaccgggagcgtcggtgaagttgtcatgcactggatc |
| | | gggcttcaacatcgaggattactacatccactgggtcaagcaacgcaccgagcaggggctggaatgg |
| | | atcggacggatcgaccccgaaaacgatgaaaccaagtacgggcctatcttccaaggacgggccacca |
| | | ttacggctgacacgtcaagcaataccgtctacctccagctttccagcctgacctccgaggacactgccgt |
| | | gtactactgcgccttcagaggaggcgtgtactggggaccaggaaccactttgaccgtgtccagcggag |
| | | gcggtggatcaggaggaggaggctcaggcggtggcggctcgcacatggacgtggtcatgactcagt |
| | | ccccgctgaccctgtcggtggcaattggacagagcgcatccatctcgtgcaagagctcacagtcgctg |
| | | ctggattccgacggaaagacttatctgaactggctgctccaaagaccagggcaatcaccgaaacgcctt |
| | | atctccctggtgtcgaaactcgactcgggtgtgccggatcggtttaccggtagcgggtccggcacgga |
| | | cttcactctccgcatttcgagggtggaagcggaggatctcgggatctactactgttggcagggaaccca |
| | | cttccctgggacttttggaggcggaactaagctggaaatcaagaccactaccccagcaccgaggccac |
| | | ccaccccggctcctaccatcgcctcccagcctctgtccctgcgtccggaggcatgtagacccgcagct |
| | | ggtggggccgtgcatacccggggtcttgacttcgcctgcgatatctacatttgggcccctctggctggta |
| | | cttgcggggtcctgctgctttcactcgtgatcactctttactgtaagcgcggtcggaagaagctgctgtac |
| | | atctttaagcaacccttcatgaggcctgtgcagactactcaagaggaggacggctgttcatgccggttcc |
| | | cagaggaggaggaaggcggctgcgaactgcgcgtgaaattcagccgcagcgcagatgctccagcct |
| | | acaagcaggggcagaaccagctctacaacgaactcaatcttggtcggagagaggagtacgacgtgct |
| | | ggacaagcggagaggacgggacccagaaatgggcgggaagccgcgcagaaagaatccccaaga |
| | | gggcctgtacaacgagctccaaaaggataagatggcagaagcctatagcgagattggtatgaaaggg |
| | | gaacgcagaagaggcaaaggccacgacggactgtaccagggactcagcaccgccaccaaggaca |
| | | cctatgacgctcttcacatgcaggccctgccgcctcgg |
| CAR 9- | 1090 | malpvtalllplalllhaarpeiqlqqsgaelvkpgasvklsctgsgfniedyyihwvkqrteqglew |
| Full-aa | | igridpendetkygpifqgratitadtssntvylqlssltsedtavyycafrggyywgpgttltvssgg |
| | | ggsggggsggggshmdvvmtqspltlsvaigqsasisckssqslldsdgktylnwllqrpgqspk |
| | | rlislvskldsgvpdrftgsgsgtdftlrisrveaedlgiyycwqgthfpgtfgggtkleiktttpaprpp |
| | | tpaptiasqplslrpeacrpaaggavhtrgldfacdiyiwaplagtcgvlllslvitlyckrgrkkllyifk |
| | | qpfmrpvqttqeedgcscrfpeeeeggcelrvkfsrsadapaykqgqnqlynelnlgrreeydvld |
| | | krrgrdpemggkprrknpqeglynelqkdkmaeayseigmkgerrrgkghdglyqglstatkdt |
| | | ydalhmqalppr |

CAR10 Anti-EGFRvIII clone 139

| | | |
|---|---|---|
| CAR 10 | 1095 | atggccctccctgtcaccgccctgctgcttccgctggctcttctgctccacgccgctcggcccgatatcc |
| Full-nt | | aaatgactcagagcccttcatccctgagcgccagcgtcggagacagggtgaccatcacgtgccgggc |
| | | atcccaaggcattagaaataacttggcgtggtatcagcaaaaaccaggaaaggccccgaagcgcctg |
| | | atctacgcggcctccaaccttcagtcaggagtgccctcgcgcttcaccgggagcggtagcggaactga |
| | | gtttacccttatcgtgtcgtccctgcagccagaggacttcgcgacctactactgcctccagcatcactcgt |
| | | acccgttgacttcgggaggcggaaccaaggtcgaaatcaaacgcactggctcgacgtcagggtccgg |
| | | taaaccgggatcgggagaaggatcggaagtccaagtgctggagagcggaggcggactcgtgcaac |
| | | ctggcgggtcgctgcggctcagctgtgccgcgtcgggttttactttcagctcgtacgctatgtcatgggt |
| | | gcggcaggctccgggaaaggggctggaatgggtgtccgctatttccggctcgggtggaagcaccaat |
| | | tacgccgactccgtgaagggacgcttcaccatctcacgggataactccaagaatactctgtacctccag |
| | | atgaactcgctgagagccgaggacaccgcagtgtactactgcgcagggtcaagcggctggtccgaat |
| | | actggggacagggcaccctcgtcactgtcagctccaccactaccccagcaccgaggccacccacccc |
| | | ggctcctaccatcgcctcccagcctctgtccctgcgtccggaggcatgtagacccgcagctggtgggg |
| | | ccgtgcatacccggggtcttgacttcgcctgcgatatctacatttgggcccctctggctggtacttgcggg |
| | | gtcctgctgctttcactcgtgatcactctttactgtaagcgcggtcggaagaagctgctgtacatctttaag |
| | | caacccttcatgaggcctgtgcagactactcaagaggaggacggctgttcatgccggttcccagagga |
| | | ggaggaaggcggctgcgaactgcgcgtgaaattcagccgcagcgcagatgctccagcctacaagca |
| | | ggggcagaaccagctctacaacgaactcaatcttggtcggagagaggagtacgacgtgctggacaag |
| | | cggagaggacgggacccagaaatgggcgggaagccgcgcagaaagaatccccaagagggcctgt |
| | | acaacgagctccaaaaggataagatggcagaagcctatagcgagattggtatgaaaggggaacgca |
| | | gaagaggcaaaggccacgacggactgtaccagggactcagcaccgccaccaaggacacctatgac |
| | | gctcttcacatgcaggccctgccgcctcgg |
| CAR 10 | 1096 | malpvtalllplalllhaarpdiqmtqspsslsasvgdrvtitcrasqgirnnlawyqqkpgkapkrli |
| Full-aa | | yaasnlqsgvpsrftgsgsgteftlivsslqpedfatyyclqhhsypltsgggtkveikrtgstsgsgkp |
| | | gsgegsevqvlesggglvqpggslrlscaasgftfssyamswvrqapgkglewvsaisgsggstny |
| | | adsvkgrftisrdnskntlylqmnslraedtavyycagssgwseywgqgtlvtvsstttpaprpptpa |
| | | ptiasqplslrpeacrpaaggavhtrgldfacdiyiwaplagtcgvlllslvitlyckrgrkkllyifkqpf |
| | | mrpvqttqeedgcscrfpeeeeggcelrvkfsrsadapaykqgqnqlynelnlgrreeydvldkrrg |
| | | rdpemggkprrknpqeglynelqkdkmaeayseigmkgerrrgkghdglyqglstatkdtydal |
| | | hmqalppr |

[0427] In one embodiment, the cell of the invention comprises a CAR molecule that binds EGFRvIII that comprises (e.g., consists of) an amino acid sequence as provided in Table 30. In one embodiment, the CAR that binds EGFRvIII comprises (e.g., consists of) an amino acid sequence of SEQ ID NO: 1043, SEQ ID NO: 1049, SEQ ID NO: 1055, SEQ ID NO: 1061, SEQ ID NO: 1067, SEQ ID NO: 1073, SEQ ID NO: 1079, SEQ ID NO: 1085, SEQ ID NO: 1090, or SEQ ID NO: 1096; or an amino acid sequence having at least one, two, three, four, five, 10, 15, 20 or 30 modifications (e.g., substitutions, e.g., conservative substitutions) but not more than 60, 50, or 40 modifications (e.g., substitutions, e.g., conservative substitutions) of an amino acid sequence of SEQ ID NO: 1043, SEQ ID NO: 1049, SEQ ID NO: 1055, SEQ ID NO: 1061, SEQ ID NO: 1067, SEQ ID NO: 1073, SEQ ID NO: 1079, SEQ ID NO: 1085, SEQ ID NO: 1090, or SEQ ID NO: 1096; or an amino acid sequence having 85%, 90%, 95%, 96%, 97%, 98%, 99% identity to an amino acid sequence of SEQ ID NO: 1043, SEQ ID NO: 1049, SEQ ID NO: 1055, SEQ ID NO: 1061, SEQ ID NO: 1067, SEQ ID NO: 1073, SEQ ID NO: 1079, SEQ ID NO: 1085, SEQ ID NO: 1090, or SEQ ID NO: 1096.

[0428] In one aspect, the cell of the invention comprises a CAR molecule comprising an antigen binding domain that binds to a tumor antigen. In one embodiment, the CAR comprises a CAR molecule comprising a CD123 antigen binding domain (e.g., a murine, human or humanized antibody or antibody fragment that specifically binds to mesothelin), a transmembrane domain, and an intracellular signaling domain (e.g., an intracellular signaling domain comprising a costimulatory domain and/or a primary signaling domain).

[0429] Exemplary CAR molecules that target CD123 are described herein (e.g., Table 26 or Table 27), and are provided in Tables 2, 6 and 9 of WO2016/028896. Other exemplary CAR molecules that target CD123 are described in WO/2014/130635 (e.g., Table 1 of WO/2014/130635). Other exemplary CAR molecules that target CD123 are described in WO/2014/144622.

[0430] In one aspect, the cell of the invention comprises a CAR molecule comprising an antigen binding domain that binds to a tumor antigen. In one embodiment, the CAR comprises CD33 antigen binding domain (e.g., a murine, human or humanized antibody or antibody fragment that specifically binds to CD33), a transmembrane domain, and an intracellular signaling domain (e.g., an intracellular signaling domain comprising a costimulatory domain and/or a primary signaling domain). Exemplary CAR molecules that target CD33 are described herein, and are provided in WO2016/014576, e.g., in Table 2 of WO2016/014576.

[0431] In one aspect, the cell of the invention comprises a CAR molecule comprising an antigen binding domain that binds to a tumor antigen. In one embodiment, the CAR comprises CLL-1 antigen binding domain (e.g., a murine, human or humanized antibody or antibody fragment that specifically binds to CLL-1), a transmembrane domain, and an intracellular signaling domain (e.g., an intracellular signaling domain comprising a costimulatory domain and/or a primary signaling domain). Exemplary CAR molecules that target CLL-1 are described herein, and are provided in WO/2016/014535, e.g., in Table 2 of WO2016/014535.

[0432] In one embodiment, the antigen binding domain of a CAR described herein is a scFv antibody fragment. In one aspect, such antibody fragments are functional in that they retain the equivalent binding affinity, e.g., they bind the same antigen with comparable efficacy, as the IgG antibody from which it is derived. In other embodiments, the antibody fragment has a lower binding affinity, e.g., it binds the same antigen with a lower binding affinity than the antibody from which it is derived, but is functional in that it provides a biological response described herein. In one embodiment, the CAR molecule comprises an antibody fragment that has a binding affinity K_{D} of 10⁻⁴ M to 10⁻⁸ M, e.g., 10⁻⁵ M to 10⁻⁷ M, e.g., 10⁻⁶ M or 10⁻⁷ M, for the target antigen. In one embodiment, the antibody fragment has a binding affinity that is at least five-fold, 10-fold, 20-fold, 30-fold, 50-fold, 100-fold or 1,000-fold less than a reference antibody, e.g., an antibody described herein.

[0433] In one embodiment, the antigen binding domain comprises a non-human antibody or antibody fragment, e.g., a mouse antibody or antibody fragment.

[0434] In another embodiment, the antigen binding domain comprises a humanized antibody or an antibody fragment. In some aspects, a non-human antibody is humanized, where specific sequences or regions of the antibody are modified to increase similarity to an antibody naturally produced in a human or fragment thereof. In one aspect, the antigen binding domain is humanized compared to the murine sequence of the antibody or antibody fragment, e.g., scFv, from which it is derived.

[0435] A humanized antibody can be produced using a variety of techniques known in the art, including but not limited to, CDR-grafting (see, e.g., European Patent No. EP 239,400; International Publication No. WO 91/09967; and U.S. Pat. Nos. 5,225,539, 5,530,101, and 5,585,089, each of which is incorporated herein in its entirety by reference), veneering or resurfacing (see, e.g., European Patent Nos. EP 592,106 and EP 519,596; Padlan, 1991, Molecular Immunology, 28(4/5):489-498; Studnicka et al., 1994, Protein Engineering, 7(6):805-814; and Roguska et al., 1994, PNAS, 91:969-973, each of which is incorporated herein by its entirety by reference), chain shuffling (see, e.g., U.S. Pat. No. 5,565,332, which is incorporated herein in its entirety by reference), and techniques disclosed in, e.g., U.S. Patent Application Publication No. US2005/0042664, U.S. Patent Application Publication No. US2005/0048617, U.S. Pat. Nos. 6,407,213, 5,766,886, International Publication No. WO 9317105, Tan et al., J. Immunol., 169:1119-25 (2002), Caldas et al., Protein Eng., 13(5):353-60 (2000), Morea et al., Methods, 20(3):267-79 (2000), Baca et al., J. Biol. Chem., 272(16):10678-84 (1997), Roguska et al., Protein Eng., 9(10):895-904 (1996), Couto et al., Cancer Res., 55 (23 Supp):5973s-5977s (1995), Couto et al., Cancer Res., 55(8):1717-22 (1995), Sandhu J S, Gene, 150(2):409-10 (1994), and Pedersen et al., J. Mol. Biol., 235(3):959-73 (1994), each of which is incorporated herein in its entirety by reference. Often, framework residues in the framework regions will be substituted with the corresponding residue from the CDR donor antibody to alter, for example improve, antigen binding. These framework substitutions are identified by methods well-known in the art, e.g., by modeling of the interactions of the CDR and framework residues to identify framework residues important for antigen binding and sequence comparison to identify unusual framework residues at particular positions. (See, e.g., Queen et al., U.S. Pat. No. 5,585,089; and Riechmann et al., 1988, Nature, 332:323, which are incorporated herein by reference in their entireties.)

[0436] A humanized antibody or antibody fragment has one or more amino acid residues remaining in it from a source which is nonhuman. These nonhuman amino acid residues are often referred to as “import” residues, which are typically taken from an “import” variable domain. As provided herein, humanized antibodies or antibody fragments comprise one or more CDRs from nonhuman immunoglobulin molecules and framework regions wherein the amino acid residues comprising the framework are derived completely or mostly from human germline. Multiple techniques for humanization of antibodies or antibody fragments are well-known in the art and can essentially be performed following the method of Winter and co-workers (Jones et al., Nature, 321:522-525 (1986); Riechmann et al., Nature, 332:323-327 (1988); Verhoeyen et al., Science, 239:1534-1536 (1988)), by substituting rodent CDRs or CDR sequences for the corresponding sequences of a human antibody, i.e., CDR-grafting (EP 239,400; PCT Publication No. WO 91/09967; and U.S. Pat. Nos. 4,816,567; 6,331,415; 5,225,539; 5,530,101; 5,585,089; 6,548,640, the contents of which are incorporated herein by reference herein in their entirety). In such humanized antibodies and antibody fragments, substantially less than an intact human variable domain has been substituted by the corresponding sequence from a nonhuman species. Humanized antibodies are often human antibodies in which some CDR residues and possibly some framework (FR) residues are substituted by residues from analogous sites in rodent antibodies. Humanization of antibodies and antibody fragments can also be achieved by veneering or resurfacing (EP 592,106; EP 519,596; Padlan, 1991, Molecular Immunology, 28(4/5):489-498; Studnicka et al., Protein Engineering, 7(6):805-814 (1994); and Roguska et al., PNAS, 91:969-973 (1994)) or chain shuffling (U.S. Pat. No. 5,565,332), the contents of which are incorporated herein by reference herein in their entirety.

[0437] The choice of human variable domains, both light and heavy, to be used in making the humanized antibodies is to reduce antigenicity. According to the so-called “best-fit” method, the sequence of the variable domain of a rodent antibody is screened against the entire library of known human variable-domain sequences. The human sequence which is closest to that of the rodent is then accepted as the human framework (FR) for the humanized antibody (Sims et al., J. Immunol., 151:2296 (1993); Chothia et al., J. Mol. Biol., 196:901 (1987), the contents of which are incorporated herein by reference herein in their entirety). Another method uses a particular framework derived from the consensus sequence of all human antibodies of a particular subgroup of light or heavy chains. The same framework may be used for several different humanized antibodies (see, e.g., Nicholson et al. Mol. Immun. 34 (16-17): 1157-1165 (1997); Carter et al., Proc. Natl. Acad. Sci. USA, 89:4285 (1992); Presta et al., J. Immunol., 151:2623 (1993), the contents of which are incorporated herein by reference herein in their entirety). In some embodiments, the framework region, e.g., all four framework regions, of the heavy chain variable region are derived from a VH4_4-59 germline sequence. In one embodiment, the framework region can comprise, one, two, three, four or five modifications, e.g., substitutions, e.g., from the amino acid at the corresponding murine sequence. In one embodiment, the framework region, e.g., all four framework regions of the light chain variable region are derived from a VK3_1.25 germline sequence. In one embodiment, the framework region can comprise, one, two, three, four or five modifications, e.g., substitutions, e.g., from the amino acid at the corresponding murine sequence.

[0438] In some aspects, the portion of a CAR of the invention that comprises an antibody fragment is humanized with retention of high affinity for the target antigen and other favorable biological properties. According to one aspect of the invention, humanized antibodies and antibody fragments are prepared by a process of analysis of the parental sequences and various conceptual humanized products using three-dimensional models of the parental and humanized sequences. Three-dimensional immunoglobulin models are commonly available and are familiar to those skilled in the art. Computer programs are available which illustrate and display probable three-dimensional conformational structures of selected candidate immunoglobulin sequences. Inspection of these displays permits analysis of the likely role of the residues in the functioning of the candidate immunoglobulin sequence, e.g., the analysis of residues that influence the ability of the candidate immunoglobulin to bind the target antigen. In this way, FR residues can be selected and combined from the recipient and import sequences so that the desired antibody or antibody fragment characteristic, such as increased affinity for the target antigen, is achieved. In general, the CDR residues are directly and most substantially involved in influencing antigen binding.

[0439] A humanized antibody or antibody fragment may retain a similar antigenic specificity as the original antibody, e.g., in the present disclosure, the ability to bind human a tumor antigen as described herein. In some embodiments, a humanized antibody or antibody fragment may have improved affinity and/or specificity of binding to a tumor antigen as described herein or a B cell antigen as described herein. In some embodiments, a humanized antibody or antibody fragment may have lower affinity and/or specificity of a tumor antigen as described herein or a B cell antigen as described herein.

[0440] In one aspect, the antigen binding domain of the invention is characterized by particular functional features or properties of an antibody or antibody fragment. For example, in one aspect, the portion of a CAR of the invention that comprises an antigen binding domain specifically binds a tumor antigen as described herein.

[0441] In one aspect, the antigen binding domain is a fragment, e.g., a single chain variable fragment (scFv). In one aspect, the anti-tumor antigen as described herein binding domain is a Fv, a Fab, a (Fab′)2, or a bi-functional (e.g. bi-specific) hybrid antibody (e.g., Lanzavecchia et al., Eur. J. Immunol. 17, 105 (1987)). In one aspect, the antibodies and fragments thereof of the invention binds a tumor antigen as described herein protein with wild-type or enhanced affinity.

[0442] In some instances, scFvs can be prepared according to method known in the art (see, for example, Bird et al., (1988) Science 242:423-426 and Huston et al., (1988) Proc. Natl. Acad. Sci. USA 85:5879-5883). ScFv molecules can be produced by linking VH and VL regions together using flexible polypeptide linkers. The scFv molecules comprise a linker (e.g., a Ser-Gly linker) with an optimized length and/or amino acid composition. The linker length can greatly affect how the variable regions of a scFv fold and interact. In fact, if a short polypeptide linker is employed (e.g., between 5-10 amino acids) intrachain folding is prevented. Interchain folding is also required to bring the two variable regions together to form a functional epitope binding site. For examples of linker orientation and size see, e.g., Hollinger et al. 1993 Proc Natl Acad. Sci. U.S.A. 90:6444-6448, U.S. Patent Application Publication Nos. 2005/0100543, 2005/0175606, 2007/0014794, and PCT publication Nos. WO2006/020258 and WO2007/024715, is incorporated herein by reference.

[0443] An scFv can comprise a linker of at least 1, 2, 3, 4, 5, 6, 7, 8, 9, 10, 11, 12, 13, 14, 15, 16, 17, 18, 19, 20, 25, 30, 35, 40, 45, 50, or more amino acid residues between its VL and VH regions. The linker sequence may comprise any naturally occurring amino acid. In some embodiments, the linker sequence comprises amino acids glycine and serine. In another embodiment, the linker sequence comprises sets of glycine and serine repeats such as (Gly₄Ser)n, where n is a positive integer equal to or greater than 1 (SEQ ID NO:22). In one embodiment, the linker can be (Gly₄Ser)₄ (SEQ ID NO:29) or (Gly₄Ser)₃(SEQ ID NO:30). Variation in the linker length may retain or enhance activity, giving rise to superior efficacy in activity studies.

[0444] In another aspect, the antigen binding domain is a T cell receptor (“TCR”), an engineered TCR, or a fragment thereof, for example, a single chain TCR (scTCR). Methods to make such TCRs are known in the art. See, e.g., Willemsen R A et al, Gene Therapy 7: 1369-1377 (2000); Zhang T et al, Cancer Gene Ther 11: 487-496 (2004); Aggen et al, Gene Ther. 19(4):365-74 (2012) (references are incorporated herein by its entirety). For example, scTCR can be engineered that contains the Vα and Vβ genes from a T cell clone linked by a linker (e.g., a flexible peptide). This approach is very useful to cancer associated target that itself is intracellular, however, a fragment of such antigen (peptide) is presented on the surface of the cancer cells by MHC.

[0445] In one aspect, the antigen binding domain of the CAR comprises an amino acid sequence that is homologous to an antigen binding domain amino acid sequence described herein, and the antigen binding domain retains the desired functional properties of the antigen binding domain described herein.

[0446] In one specific aspect, the CAR composition of the invention comprises an antibody fragment. In a further aspect, the antibody fragment comprises a scFv. In a further aspect, the antibody fragment comprises a variable heavy chain (VH) only.

[0447] In various aspects, the antigen binding domain of the CAR is engineered by modifying one or more amino acids within one or both variable regions (e.g., VH and/or VL), for example within one or more CDR regions and/or within one or more framework regions. In one specific aspect, the CAR composition of the invention comprises an antibody fragment. In a further aspect, the antibody fragment comprises an scFv.

[0448] It will be understood by one of ordinary skill in the art that the antibody or antibody fragment of the invention may further be modified such that they vary in amino acid sequence (e.g., from wild-type), but not in desired activity. For example, additional nucleotide substitutions leading to amino acid substitutions at “non-essential” amino acid residues may be made to the protein. For example, a nonessential amino acid residue in a molecule may be replaced with another amino acid residue from the same side chain family. In another embodiment, a string of amino acids can be replaced with a structurally similar string that differs in order and/or composition of side chain family members, e.g., a conservative substitution, in which an amino acid residue is replaced with an amino acid residue having a similar side chain, may be made.

[0449] Families of amino acid residues having similar side chains have been defined in the art, including basic side chains (e.g., lysine, arginine, histidine), acidic side chains (e.g., aspartic acid, glutamic acid), uncharged polar side chains (e.g., glycine, asparagine, glutamine, serine, threonine, tyrosine, cysteine), nonpolar side chains (e.g., alanine, valine, leucine, isoleucine, proline, phenylalanine, methionine, tryptophan), beta-branched side chains (e.g., threonine, valine, isoleucine) and aromatic side chains (e.g., tyrosine, phenylalanine, tryptophan, histidine).

[0450] Percent identity in the context of two or more nucleic acids or polypeptide sequences, refers to two or more sequences that are the same. Two sequences are “substantially identical” if two sequences have a specified percentage of amino acid residues or nucleotides that are the same (e.g., 60% identity, optionally 70%, 71%, 72%, 73%, 74%, 75%, 76%, 77%, 78%, 79%, 80%, 81%, 82%, 83%, 84%, 85%, 86%, 87%, 88%, 89%, 90%, 91%, 92%, 93%, 94%, 95%, 96%, 97%, 98%, 99% identity over a specified region, or, when not specified, over the entire sequence), when compared and aligned for maximum correspondence over a comparison window, or designated region as measured using one of the following sequence comparison algorithms or by manual alignment and visual inspection. Optionally, the identity exists over a region that is at least about 50 nucleotides (or 10 amino acids) in length, or more preferably over a region that is 100 to 500 or 1000 or more nucleotides (or 20, 50, 200 or more amino acids) in length.

[0451] For sequence comparison, typically one sequence acts as a reference sequence, to which test sequences are compared. When using a sequence comparison algorithm, test and reference sequences are entered into a computer, subsequence coordinates are designated, if necessary, and sequence algorithm program parameters are designated. Default program parameters can be used, or alternative parameters can be designated. The sequence comparison algorithm then calculates the percent sequence identities for the test sequences relative to the reference sequence, based on the program parameters. Methods of alignment of sequences for comparison are well known in the art. Optimal alignment of sequences for comparison can be conducted, e.g., by the local homology algorithm of Smith and Waterman, (1970) Adv. Appl. Math. 2:482c, by the homology alignment algorithm of Needleman and Wunsch, (1970) J. Mol. Biol. 48:443, by the search for similarity method of Pearson and Lipman, (1988) Proc. Nat'l. Acad. Sci. USA 85:2444, by computerized implementations of these algorithms (GAP, BESTFIT, FASTA, and TFASTA in the Wisconsin Genetics Software Package, Genetics Computer Group, 575 Science Dr., Madison, Wis.), or by manual alignment and visual inspection (see, e.g., Brent et al., (2003) Current Protocols in Molecular Biology).

[0452] Two examples of algorithms that are suitable for determining percent sequence identity and sequence similarity are the BLAST and BLAST 2.0 algorithms, which are described in Altschul et al., (1977) Nuc. Acids Res. 25:3389-3402; and Altschul et al., (1990) J. Mol. Biol. 215:403-410, respectively. Software for performing BLAST analyses is publicly available through the National Center for Biotechnology Information.

[0453] The percent identity between two amino acid sequences can also be determined using the algorithm of E. Meyers and W. Miller, (1988) Comput. Appl. Biosci. 4:11-17) which has been incorporated into the ALIGN program (version 2.0), using a PAM120 weight residue table, a gap length penalty of 12 and a gap penalty of 4. In addition, the percent identity between two amino acid sequences can be determined using the Needleman and Wunsch (1970) J. Mol. Biol. 48:444-453) algorithm which has been incorporated into the GAP program in the GCG software package (available at www.gcg.com), using either a Blossom 62 matrix or a PAM250 matrix, and a gap weight of 16, 14, 12, 10, 8, 6, or 4 and a length weight of 1, 2, 3, 4, 5, or 6.

[0454] In one aspect, the present disclosure contemplates modifications of the starting antibody or fragment (e.g., scFv) amino acid sequence that generate functionally equivalent molecules. For example, the VH or VL of an antigen binding domain to -a tumor antigen described herein, e.g., scFv, comprised in the CAR can be modified to retain at least about 70%, 71%. 72%. 73%, 74%, 75%, 76%, 77%, 78%, 79%, 80%, 81%, 82%, 83%, 84%, 85%, 86%, 87%, 88%, 89%, 90%, 91%, 92%, 93%, 94%, 95%, 96%, 97%, 98%, 99% identity of the starting VH or VL framework region of the antigen binding domain to the tumor antigen described herein, e.g., scFv. The present disclosure contemplates modifications of the entire CAR construct, e.g., modifications in one or more amino acid sequences of the various domains of the CAR construct in order to generate functionally equivalent molecules. The CAR construct can be modified to retain at least about 70%, 71%. 72%. 73%, 74%, 75%, 76%, 77%, 78%, 79%, 80%, 81%, 82%, 83%, 84%, 85%, 86%, 87%, 88%, 89%, 90%, 91%, 92%, 93%, 94%, 95%, 96%, 97%, 98%, 99% identity of the starting CAR construct.

[0455] Bispecific CARs

[0456] In an embodiment a multispecific antibody molecule is a bispecific antibody molecule. A bispecific antibody has specificity for no more than two antigens. A bispecific antibody molecule is characterized by a first immunoglobulin variable domain sequence which has binding specificity for a first epitope and a second immunoglobulin variable domain sequence that has binding specificity for a second epitope. In an embodiment the first and second epitopes are on the same antigen, e.g., the same protein (or subunit of a multimeric protein). In an embodiment the first and second epitopes overlap. In an embodiment the first and second epitopes do not overlap. In an embodiment the first and second epitopes are on different antigens, e.g., different proteins (or different subunits of a multimeric protein). In an embodiment a bispecific antibody molecule comprises a heavy chain variable domain sequence and a light chain variable domain sequence which have binding specificity for a first epitope and a heavy chain variable domain sequence and a light chain variable domain sequence which have binding specificity for a second epitope. In an embodiment a bispecific antibody molecule comprises a half antibody having binding specificity for a first epitope and a half antibody having binding specificity for a second epitope. In an embodiment a bispecific antibody molecule comprises a half antibody, or fragment thereof, having binding specificity for a first epitope and a half antibody, or fragment thereof, having binding specificity for a second epitope. In an embodiment a bispecific antibody molecule comprises a scFv, or fragment thereof, have binding specificity for a first epitope and a scFv, or fragment thereof, have binding specificity for a second epitope.

[0457] In certain embodiments, the antibody molecule is a multi-specific (e.g., a bispecific or a trispecific) antibody molecule. Protocols for generating bispecific or heterodimeric antibody molecules are known in the art; including but not limited to, for example, the “knob in a hole” approach described in, e.g., U.S. Pat. No. 5,731,168; the electrostatic steering Fc pairing as described in, e.g., WO 09/089004, WO 06/106905 and WO 2010/129304; Strand Exchange Engineered Domains (SEED) heterodimer formation as described in, e.g., WO 07/110205; Fab arm exchange as described in, e.g., WO 08/119353, WO 2011/131746, and WO 2013/060867; double antibody conjugate, e.g., by antibody cross-linking to generate a bi-specific structure using a heterobifunctional reagent having an amine-reactive group and a sulfhydryl reactive group as described in, e.g., U.S. Pat. No. 4,433,059; bispecific antibody determinants generated by recombining half antibodies (heavy-light chain pairs or Fabs) from different antibodies through cycle of reduction and oxidation of disulfide bonds between the two heavy chains, as described in, e.g., U.S. Pat. No. 4,444,878; trifunctional antibodies, e.g., three Fab′ fragments cross-linked through sulfhdryl reactive groups, as described in, e.g., U.S. Pat. No. 5,273,743; biosynthetic binding proteins, e.g., pair of scFvs cross-linked through C-terminal tails preferably through disulfide or amine-reactive chemical cross-linking, as described in, e.g., U.S. Pat. No. 5,534,254; bifunctional antibodies, e.g., Fab fragments with different binding specificities dimerized through leucine zippers (e.g., c-fos and c-jun) that have replaced the constant domain, as described in, e.g., U.S. Pat. No. 5,582,996; bispecific and oligospecific mono- and oligovalent receptors, e.g., VH-CH1 regions of two antibodies (two Fab fragments) linked through a polypeptide spacer between the CH1 region of one antibody and the VH region of the other antibody typically with associated light chains, as described in, e.g., U.S. Pat. No. 5,591,828; bispecific DNA-antibody conjugates, e.g., crosslinking of antibodies or Fab fragments through a double stranded piece of DNA, as described in, e.g., U.S. Pat. No. 5,635,602; bispecific fusion proteins, e.g., an expression construct containing two scFvs with a hydrophilic helical peptide linker between them and a full constant region, as described in, e.g., U.S. Pat. No. 5,637,481; multivalent and multispecific binding proteins, e.g., dimer of polypeptides having first domain with binding region of Ig heavy chain variable region, and second domain with binding region of Ig light chain variable region, generally termed diabodies (higher order structures are also encompassed creating for bispecifc, trispecific, or tetraspecific molecules, as described in, e.g., U.S. Pat. No. 5,837,242; minibody constructs with linked VL and VH chains further connected with peptide spacers to an antibody hinge region and CH3 region, which can be dimerized to form bispecific/multivalent molecules, as described in, e.g., U.S. Pat. No. 5,837,821; VH and VL domains linked with a short peptide linker (e.g., 5 or 10 amino acids) or no linker at all in either orientation, which can form dimers to form bispecific diabodies; trimers and tetramers, as described in, e.g., U.S. Pat. No. 5,844,094; String of VH domains (or VL domains in family members) connected by peptide linkages with crosslinkable groups at the C-terminus futher associated with VL domains to form a series of FVs (or scFvs), as described in, e.g., U.S. Pat. No. 5,864,019; and single chain binding polypeptides with both a VH and a VL domain linked through a peptide linker are combined into multivalent structures through non-covalent or chemical crosslinking to form, e.g., homobivalent, heterobivalent, trivalent, and tetravalent structures using both scFV or diabody type format, as described in, e.g., U.S. Pat. No. 5,869,620. Additional exemplary multispecific and bispecific molecules and methods of making the same are found, for example, in U.S. Pat. Nos. 5,910,573, 5,932,448, 5,959,083, 5,989,830, 6,005,079, 6,239,259, 6,294,353, 6,333,396, 6,476,198, 6,511,663, 6,670,453, 6,743,896, 6,809,185, 6,833,441, 7,129,330, 7,183,076, 7,521,056, 7,527,787, 7,534,866, 7,612,181, US2002004587A1, US2002076406A1, US2002103345A1, US2003207346A1, US2003211078A1, US2004219643A1, US2004220388A1, US2004242847A1, US2005003403A1, US2005004352A1, US2005069552A1, US2005079170A1, US2005100543A1, US2005136049A1, US2005136051A1, US2005163782A1, US2005266425A1, US2006083747A1, US2006120960A1, US2006204493A1, US2006263367A1, US2007004909A1, US2007087381A1, US2007128150A1, US2007141049A1, US2007154901A1, US2007274985A1, US2008050370A1, US2008069820A1, US2008152645A1, US2008171855A1, US2008241884A1, US2008254512A1, US2008260738A1, US2009130106A1, US2009148905A1, US2009155275A1, US2009162359A1, US2009162360A1, US2009175851A1, US2009175867A1, US2009232811A1, US2009234105A1, US2009263392A1, US2009274649A1, EP346087A2, WO0006605A2, WO02072635A2, WO04081051A1, WO06020258A2, WO2007044887A2, WO2007095338A2, WO2007137760A2, WO2008119353A1, WO2009021754A2, WO2009068630A1, WO9103493A1, WO9323537A1, WO9409131A1, WO9412625A2, WO9509917A1, WO9637621A2, WO9964460A1. The contents of the above-referenced applications are incorporated herein by reference in their entireties.

[0458] Within each antibody or antibody fragment (e.g., scFv) of a bispecific antibody molecule, the VH can be upstream or downstream of the VL. In some embodiments, the upstream antibody or antibody fragment (e.g., scFv) is arranged with its VH (VH₁) upstream of its VL (VL₁) and the downstream antibody or antibody fragment (e.g., scFv) is arranged with its VL (VL₂) upstream of its VH (VH₂), such that the overall bispecific antibody molecule has the arrangement VH₁-VL₁-VL₂-VH₂. In other embodiments, the upstream antibody or antibody fragment (e.g., scFv) is arranged with its VL (VL₁) upstream of its VH (VH₁) and the downstream antibody or antibody fragment (e.g., scFv) is arranged with its VH (VH₂) upstream of its VL (VL₂), such that the overall bispecific antibody molecule has the arrangement VL₁-VH₁-VH₂-VL₂. Optionally, a linker is disposed between the two antibodies or antibody fragments (e.g., scFvs), e.g., between VL₁ and VL₂ if the construct is arranged as VH₁-VL₁-VL₂-VH₂, or between VH₁ and VH₂ if the construct is arranged as VL₁-VH₁-VH₂-VL₂. The linker may be a linker as described herein, e.g., a (Gly₄-Ser)n linker, wherein n is 1, 2, 3, 4, 5, or 6, preferably 4 (SEQ ID NO: 80). In general, the linker between the two scFvs should be long enough to avoid mispairing between the domains of the two scFvs. Optionally, a linker is disposed between the VL and VH of the first scFv. Optionally, a linker is disposed between the VL and VH of the second scFv. In constructs that have multiple linkers, any two or more of the linkers can be the same or different. Accordingly, in some embodiments, a bispecific CAR comprises VLs, VHs, and optionally one or more linkers in an arrangement as described herein.

[0459] In one aspect, the invention provides a chimeric antigen receptor comprising a bispecific antigen binding domain, a transmembrane domain (e.g., as described herein), and an intracellular signaling domain (e.g., as described herein). In another aspect, the invention provides a cell (e.g., a population of cells), e.g., an immune effector cell, e.g., a T cell or NK cell, e.g., as described herein, which is engineered to express (e.g., comprises) a bispecific CAR as described herein. Without being bound by any theory, it is believed that cells expressing such bispecific CARs are useful in the methods and compositions described herein.

[0460] Chimeric TCR

[0461] In one aspect, the antigen binding domains described herein, e.g., the antibodies and antibody fragments, e.g., provided in the Tables herein, can be grafted to one or more constant domain of a T cell receptor (“TCR”) chain, for example, a TCR alpha or TCR beta chain, to create an chimeric TCR that binds specifically to a tumor antigen, e.g., a solid tumor antigen or antigen expressed on a tumor associated with TAMs, described herein. Without being bound by theory, it is believed that chimeric TCRs will signal through the TCR complex upon antigen binding. For example, a mesothelin or CD19 scFv or a fragment there of, e.g., a VL domain, or VH domain, as disclosed herein, can be grafted to the constant domain, e.g., at least a portion of the extracellular constant domain, the transmembrane domain and the cytoplasmic domain, of a TCR chain, for example, the TCR alpha chain and/or the TCR beta chain. As another example, the CDRs of an antibody or antibody fragment, e.g., the CDRs of anyantibody or antibody fragment as described in Tables provided herein may be grafted into a TCR alpha and/or beta chain to create a chimeric TCR that binds specifically to a tumor antigen, e.g., a solid tumor antigen or antigen expressed on a tumor associated with TAMs, described herein. For example, the LCDRs disclosed herein may be grafted into the variable domain of a TCR alpha chain and the HCDRs disclosed herein may be grafted to the variable domain of a TCR beta chain, or vice versa. Such chimeric TCRs may be produced by methods known in the art (For example, Willemsen R A et al, Gene Therapy 2000; 7: 1369-1377; Zhang T et al, Cancer Gene Ther 2004; 11: 487-496; Aggen et al, Gene Ther. 2012 April; 19(4):365-74).

[0462] Transmembrane Domain

[0463] With respect to the transmembrane domain, in various embodiments, a CAR can be designed to comprise a transmembrane domain that is attached to the extracellular domain of the CAR, e.g., the antigen binding domain. A transmembrane domain can include one or more additional amino acids adjacent to the transmembrane region, e.g., one or more amino acid associated with the extracellular region of the protein from which the transmembrane was derived (e.g., 1, 2, 3, 4, 5, 6, 7, 8, 9, 10 up to 15 amino acids of the extracellular region) and/or one or more additional amino acids associated with the intracellular region of the protein from which the transmembrane protein is derived (e.g., 1, 2, 3, 4, 5, 6, 7, 8, 9, 10 up to 15 amino acids of the intracellular region). In one aspect, the transmembrane domain is one that is associated with one of the other domains of the CAR, for example, the transmembrane domain is from the same protein as the intracellular signalling domain, e.g., the costimulatory domain. In some instances, the transmembrane domain can be selected or modified by amino acid substitution to avoid binding of such domains to the transmembrane domains of the same or different surface membrane proteins, e.g., to minimize interactions with other members of the receptor complex. In one aspect, the transmembrane domain is capable of homodimerization with another CAR on the cell surface of a CAR-expressing cell. In a different aspect, the amino acid sequence of the transmembrane domain may be modified or substituted so as to minimize interactions with the binding domains of the native binding partner present in the same CAR-expressing cell.

[0464] The transmembrane domain may be derived either from a natural or from a recombinant source. Where the source is natural, the domain may be derived from any membrane-bound or transmembrane protein. In one aspect the transmembrane domain is capable of signaling to the intracellular domain(s) whenever the CAR has bound to a target. A transmembrane domain of particular use in this invention may include at least the transmembrane region(s) of e.g., the alpha, beta or zeta chain of the T-cell receptor, CD28, CD27, CD3 epsilon, CD45, CD4, CDS, CD8, CD9, CD16, CD22, CD33, CD37, CD64, CD80, CD86, CD134, CD137, CD154. In some embodiments, a transmembrane domain may include at least the transmembrane region(s) of, e.g., KIRDS2, OX40, CD2, CD27, LFA-1 (CD11a, CD18), ICOS (CD278), 4-1BB (CD137), GITR, CD40, BAFFR, HVEM (LIGHTR), SLAMF7, NKp80 (KLRF1), NKp44, NKp30, NKp46, CD160, CD19, IL2R beta, IL2R gamma, IL7R a, ITGA1, VLA1, CD49a, ITGA4, IA4, CD49D, ITGA6, VLA-6, CD49f, ITGAD, CD11d, ITGAE, CD103, ITGAL, CD11a, LFA-1, ITGAM, CD11b, ITGAX, CD11c, ITGB1, CD29, ITGB2, CD18, LFA-1, ITGB7, TNFR2, DNAM1 (CD226), SLAMF4 (CD244, 2B4), CD84, CD96 (Tactile), CEACAM1, CRTAM, Ly9 (CD229), CD160 (BY55), PSGL1, CD100 (SEMA4D), SLAMF6 (NTB-A, Ly108), SLAM (SLAMF1, CD150, IPO-3), BLAME (SLAMF8), SELPLG (CD162), LTBR, PAG/Cbp, NKG2D, NKG2C.

[0465] In some instances, the transmembrane domain can be attached to the extracellular region of the CAR, e.g., the antigen binding domain of the CAR, via a hinge, e.g., a hinge from a human protein. For example, in one embodiment, the hinge can be a human Ig (immunoglobulin) hinge, e.g., an IgG4 hinge, or a CD8a hinge. In one embodiment, the hinge or spacer comprises (e.g., consists of) the amino acid sequence of SEQ ID NO:4. In one aspect, the transmembrane domain comprises (e.g., consists of) a transmembrane domain of SEQ ID NO: 12.

[0466] In one aspect, the hinge or spacer comprises an IgG4 hinge. For example, in one embodiment, the hinge or spacer comprises a hinge of the amino acid sequence SEQ ID NO: 6. In some embodiments, the hinge or spacer comprises a hinge encoded by a nucleotide sequence of SEQ ID NO: 7. In one aspect, the hinge or spacer comprises an IgD hinge. For example, in one embodiment, the hinge or spacer comprises a hinge of the amino acid sequence SEQ ID NO: 8. In some embodiments, the hinge or spacer comprises a hinge encoded by a nucleotide sequence of SEQ ID NO: 9.

[0467] In one aspect, the transmembrane domain may be recombinant, in which case it will comprise predominantly hydrophobic residues such as leucine and valine. In one aspect a triplet of phenylalanine, tryptophan and valine can be found at each end of a recombinant transmembrane domain.

[0468] Optionally, a short oligo- or polypeptide linker, between 2 and 10 amino acids in length may form the linkage between the transmembrane domain and the cytoplasmic region of the CAR. A glycine-serine doublet provides a particularly suitable linker. For example, in one aspect, the linker comprises the amino acid sequence of GGGGSGGGGS (SEQ ID NO:10). In some embodiments, the linker is encoded by a nucleotide sequence of

(SEQ ID NO: 11)

GGTGGCGGAGGTTCTGGAGGTGGAGGTTCC.

[0469] In one aspect, the hinge or spacer comprises a KIR2DS2 hinge.

[0470] Cytoplasmic Domain

[0471] The cytoplasmic domain or region of the CAR includes an intracellular signaling domain. An intracellular signaling domain is generally responsible for activation of at least one of the normal effector functions of the immune cell in which the CAR has been introduced. The term “effector function” refers to a specialized function of a cell. Effector function of a T cell, for example, may be cytolytic activity or helper activity including the secretion of cytokines. Thus the term “intracellular signaling domain” refers to the portion of a protein which transduces the effector function signal and directs the cell to perform a specialized function. While usually the entire intracellular signaling domain can be employed, in many cases it is not necessary to use the entire chain. To the extent that a truncated portion of the intracellular signaling domain is used, such truncated portion may be used in place of the intact chain as long as it transduces the effector function signal. The term intracellular signaling domain is thus meant to include any truncated portion of the intracellular signaling domain sufficient to transduce the effector function signal.

[0472] Examples of intracellular signaling domains for use in the CAR of the invention include the cytoplasmic sequences of the T cell receptor (TCR) and co-receptors that act in concert to initiate signal transduction following antigen receptor engagement, as well as any derivative or variant of these sequences and any recombinant sequence that has the same functional capability.

[0473] It is known that signals generated through the TCR alone are insufficient for full activation of the T cell and that a secondary and/or costimulatory signal is also required. Thus, T cell activation can be said to be mediated by two distinct classes of cytoplasmic signaling sequences: those that initiate antigen-dependent primary activation through the TCR (primary intracellular signaling domains) and those that act in an antigen-independent manner to provide a secondary or costimulatory signal (secondary cytoplasmic domain, e.g., a costimulatory domain).

[0474] A primary signaling domain regulates primary activation of the TCR complex either in a stimulatory way, or in an inhibitory way. Primary intracellular signaling domains that act in a stimulatory manner may contain signaling motifs which are known as immunoreceptor tyrosine-based activation motifs or ITAMs.

[0475] Examples of ITAM containing primary intracellular signaling domains that are of particular use in the invention include those of TCR zeta, FcR gamma, FcR beta, CD3 gamma, CD3 delta, CD3 epsilon, CD5, CD22, CD79a, CD79b, CD278 (also known as “ICOS”), FcεRI, DAP10, DAP12, and CD66d. In one embodiment, a CAR of the invention comprises an intracellular signaling domain, e.g., a primary signaling domain of CD3-zeta, e.g., a CD3-zeta sequence described herein.

[0476] In one embodiment, a primary signaling domain comprises a modified ITAM domain, e.g., a mutated ITAM domain which has altered (e.g., increased or decreased) activity as compared to the native ITAM domain. In one embodiment, a primary signaling domain comprises a modified ITAM-containing primary intracellular signaling domain, e.g., an optimized and/or truncated ITAM-containing primary intracellular signaling domain. In an embodiment, a primary signaling domain comprises one, two, three, four or more ITAM motifs.

[0477] The intracellular signaling domain of the CAR can comprise the CD3-zeta signaling domain by itself or it can be combined with any other desired intracellular signaling domain(s) useful in the context of a CAR of the invention. For example, the intracellular signaling domain of the CAR can comprise a CD3 zeta chain portion and a costimulatory signaling domain. The costimulatory signaling domain refers to a portion of the CAR comprising the intracellular domain of a costimulatory molecule. A costimulatory molecule is a cell surface molecule other than an antigen receptor or its ligands that is required for an efficient response of lymphocytes to an antigen. Examples of such molecules include CD27, CD28, 4-1BB (CD137), OX40, CD30, CD40, PD-1, ICOS, lymphocyte function-associated antigen-1 (LFA-1), CD2, CD7, LIGHT, NKG2C, B7-H3, and a ligand that specifically binds with CD83, and the like. For example, CD27 costimulation has been demonstrated to enhance expansion, effector function, and survival of human CART cells in vitro and augments human T cell persistence and antitumor activity in vivo (Song et al. Blood. 2012; 119(3):696-706). Further examples of such costimulatory molecules include an MHC class I molecule, a TNF receptor protein, an Immunoglobulin-like protein, a cytokine receptor, an integrin, a signaling lymphocytic activation molecule (SLAM protein), an activating NK cell receptor, BTLA, a Toll ligand receptor, OX40, CD2, CD7, CD27, CD28, CD30, CD40, CDS, ICAM-1, LFA-1 (CD11a/CD18), 4-1BB (CD137), B7-H3, CDS, ICAM-1, ICOS (CD278), GITR, BAFFR, LIGHT, HVEM (LIGHTR), KIRDS2, SLAMF7, NKp80 (KLRF1), NKp44, NKp30, NKp46, CD19, CD4, CD8alpha, CD8beta, IL2R beta, IL2R gamma, IL7R alpha, ITGA4, VLA1, CD49a, ITGA4, IA4, CD49D, ITGA6, VLA-6, CD49f, ITGAD, CD11d, ITGAE, CD103, ITGAL, CD11a, LFA-1, ITGAM, CD11b, ITGAX, CD11c, ITGB1, CD29, ITGB2, CD18, LFA-1, ITGB7, NKG2D, NKG2C, TNFR2, TRANCE/RANKL, DNAM1 (CD226), SLAMF4 (CD244, 2B4), CD84, CD96 (Tactile), CEACAM1, CRTAM, Ly9 (CD229), CD160 (BY55), PSGL1, CD100 (SEMA4D), CD69, SLAMF6 (NTB-A, Ly108), SLAM (SLAMF1, CD150, IPO-3), BLAME (SLAMF8), SELPLG (CD162), LTBR, LAT, GADS, SLP-76, PAG/Cbp, CD19a, and a ligand that specifically binds with CD83.

[0478] The intracellular signaling sequences within the cytoplasmic portion of the CAR of the invention may be linked to each other in a random or specified order. Optionally, a short oligo- or polypeptide linker, for example, between 2 and 10 amino acids (e.g., 2, 3, 4, 5, 6, 7, 8, 9, or 10 amino acids) in length may form the linkage between intracellular signaling sequence. In one embodiment, a glycine-serine doublet can be used as a suitable linker. In one embodiment, a single amino acid, e.g., an alanine, a glycine, can be used as a suitable linker.

[0479] In one aspect, the intracellular signaling domain is designed to comprise two or more, e.g., 2, 3, 4, 5, or more, costimulatory signaling domains. In an embodiment, the two or more, e.g., 2, 3, 4, 5, or more, costimulatory signaling domains, are separated by a linker molecule, e.g., a linker molecule described herein. In one embodiment, the intracellular signaling domain comprises two costimulatory signaling domains. In some embodiments, the linker molecule is a glycine residue. In some embodiments, the linker is an alanine residue.

[0480] In one aspect, the intracellular signaling domain is designed to comprise the signaling domain of CD3-zeta and the signaling domain of CD28. In one aspect, the intracellular signaling domain is designed to comprise the signaling domain of CD3-zeta and the signaling domain of 4-1BB. In one aspect, the signaling domain of 4-1BB is a signaling domain of SEQ ID NO: 14. In one aspect, the signaling domain of CD3-zeta is a signaling domain of SEQ ID NO: 18.

[0481] In one aspect, the intracellular signaling domain is designed to comprise the signaling domain of CD3-zeta and the signaling domain of CD27. In one aspect, the signaling domain of CD27 comprises an amino acid sequence of SEQ ID NO:16. In one aspect, the signalling domain of CD27 is encoded by a nucleic acid sequence of SEQ ID NO:17.

[0482] In one aspect, the intracellular is designed to comprise the signaling domain of CD3-zeta and the signaling domain of CD28. In one aspect, the signaling domain of CD28 comprises an amino acid sequence of SEQ ID NO: 44. In one aspect, the signaling domain of CD28 is encoded by a nucleic acid sequence of SEQ ID NO: 45.

[0483] In one aspect, the intracellular is designed to comprise the signaling domain of CD3-zeta and the signaling domain of ICOS. In one aspect, the signaling domain of ICOS comprises an amino acid sequence of SEQ ID NO: 42. In one aspect, the signaling domain of ICOS is encoded by a nucleic acid sequence of SEQ ID NO: 43.

[0484] In one aspect, the cell of the invention, e.g., described herein, e.g., a cell expressing a CAR described herein, includes a CAR that includes an antigen binding domain that binds a target tumor antigen described herein (e.g., a solid tumor antigen or antigen expressed on a tumor associated with MDSCs or TAMs), a transmembrane domain, a primary signaling domain, and one or more (e.g., one) costimulatory signaling domain.

[0485] In one embodiment, the CAR-expressing cell may further comprise an inhibitory CAR. In one embodiment, the inhibitory CAR comprises an antigen binding domain that binds an antigen found on normal cells but not cancer cells, e.g., normal cells that also express the tumor antigen targeted by the CAR. In one embodiment, the inhibitory CAR comprises the antigen binding domain, a transmembrane domain and an intracellular domain of an inhibitory molecule. For example, the intracellular domain of the inhibitory CAR can be an intracellular domain of PD1, PD-L1, CTLA4, TIM3, LAGS, VISTA, BTLA, TIGIT, LAIR1, CD160, 2B4, CD80, CD86, B7-H3 (CD276), B7-H4 (VTCN1), HVEM (TNFRSF14 or CD270), KIR, A2aR, MHC class I, MHC class II, GALS, adenosine, or TGF beta.

[0486] In one embodiment, the antigen binding domains of the CARs can be such that the antigen binding domains do not interact with one another. For example, a cell expressing a first and second CAR can have an antigen binding domain of the first CAR, e.g., as a fragment, e.g., an scFv, that does not form an association with the antigen binding domain of the second CAR, e.g., the antigen binding domain of the second CAR is a VHH.

[0487] In some embodiments, the antigen binding domain comprises a single domain antigen binding (SDAB) molecules include molecules whose complementary determining regions are part of a single domain polypeptide. Examples include, but are not limited to, heavy chain variable domains, binding molecules naturally devoid of light chains, single domains derived from conventional 4-chain antibodies, engineered domains and single domain scaffolds other than those derived from antibodies. SDAB molecules may be any of the art, or any future single domain molecules. SDAB molecules may be derived from any species including, but not limited to mouse, human, camel, llama, lamprey, fish, shark, goat, rabbit, and bovine. This term also includes naturally occurring single domain antibody molecules from species other than Camelidae and sharks.

[0488] In one aspect, an SDAB molecule can be derived from a variable region of the immunoglobulin found in fish, such as, for example, that which is derived from the immunoglobulin isotype known as Novel Antigen Receptor (NAR) found in the serum of shark. Methods of producing single domain molecules derived from a variable region of NAR (“IgNARs”) are described in WO 03/014161 and Streltsov (2005) Protein Sci. 14:2901-2909.

[0489] According to another aspect, an SDAB molecule is a naturally occurring single domain antigen binding molecule known as heavy chain devoid of light chains. Such single domain molecules are disclosed in WO 9404678 and Hamers-Casterman, C. et al. (1993) Nature 363:446-448, for example. For clarity reasons, this variable domain derived from a heavy chain molecule naturally devoid of light chain is known herein as a VHH or nanobody to distinguish it from the conventional VH of four chain immunoglobulins. Such a VHH molecule can be derived from Camelidae species, for example in camel, llama, dromedary, alpaca and guanaco. Other species besides Camelidae may produce heavy chain molecules naturally devoid of light chain; such VHHs are within the scope of the invention.

[0490] The SDAB molecules can be recombinant, CDR-grafted, humanized, camelized, de-immunized and/or in vitro generated (e.g., selected by phage display).

[0491] It has also been discovered, that cells having a plurality of chimeric membrane embedded receptors comprising an antigen binding domain that interactions between the antigen binding domain of the receptors can be undesirable, e.g., because it inhibits the ability of one or more of the antigen binding domains to bind its cognate antigen. Accordingly, disclosed herein are cells having a first and a second non-naturally occurring chimeric membrane embedded receptor comprising antigen binding domains that minimize such interactions. Also disclosed herein are nucleic acids encoding a first and a second non-naturally occurring chimeric membrane embedded receptor comprising a antigen binding domains that minimize such interactions, as well as methods of making and using such cells and nucleic acids. In an embodiment the antigen binding domain of one of said first said second non-naturally occurring chimeric membrane embedded receptor, comprises an scFv, and the other comprises a single VH domain, e.g., a camelid, shark, or lamprey single VH domain, or a single VH domain derived from a human or mouse sequence.

[0492] In some embodiments, the claimed invention comprises a first and second CAR, wherein the antigen binding domain of one of the first CAR and the second CAR does not comprise a variable light domain and a variable heavy domain. In some embodiments, the antigen binding domain of one of the first CAR and the second CAR is an scFv, and the other is not an scFv. In some embodiments, the antigen binding domain of one of the first CAR and the second CAR comprises a single VH domain, e.g., a camelid, shark, or lamprey single VH domain, or a single VH domain derived from a human or mouse sequence. In some embodiments, the antigen binding domain of one of the first CAR and the second CAR comprises a nanobody. In some embodiments, the antigen binding domain of one of the first CAR and the second CAR comprises a camelid VHH domain.

[0493] In some embodiments, the antigen binding domain of one of the first CAR and the second CAR comprises an scFv, and the other comprises a single VH domain, e.g., a camelid, shark, or lamprey single VH domain, or a single VH domain derived from a human or mouse sequence. In some embodiments, the antigen binding domain of one of the first CAR and the second CAR comprises an scFv, and the other comprises a nanobody. In some embodiments, the antigen binding domain of one of the first CAR and the second CAR comprises comprises an scFv, and the other comprises a camelid VHH domain.

[0494] In some embodiments, when present on the surface of a cell, binding of the antigen binding domain of the first CAR to its cognate antigen is not substantially reduced by the presence of the second CAR. In some embodiments, binding of the antigen binding domain of the first CAR to its cognate antigen in the presence of the second CAR is 85%, 90%, 95%, 96%, 97%, 98% or 99% of binding of the antigen binding domain of the first CAR to its cognate antigen in the absence of the second CAR.

[0495] In some embodiments, when present on the surface of a cell, the antigen binding domains of the first CAR and the second CAR, associate with one another less than if both were scFv antigen binding domains. In some embodiments, the antigen binding domains of said first CAR said second CAR, associate with one another 85%, 90%, 95%, 96%, 97%, 98% or 99% less than if both were scFv antigen binding domains.

[0496] In another aspect, the CAR-expressing cell described herein can further express another agent, e.g., an agent which enhances the activity of a CAR-expressing cell. For example, in one embodiment, the agent can be an agent which inhibits an inhibitory molecule. Inhibitory molecules, e.g., PD1, can, in some embodiments, decrease the ability of a CAR-expressing cell to mount an immune effector response. Examples of inhibitory molecules include PD1, PD-L1, CTLA4, TIM3, CEACAM (e.g., CEACAM-1, CEACAM-3 and/or CEACAM-5), LAG3, VISTA, BTLA, TIGIT, LAIR1, CD160, 2B4, CD80, CD86, B7-H3 (CD276), B7-H4 (VTCN1), HVEM (TNFRSF14 or CD270), KIR, A2aR, MHC class I, MHC class II, GAL9, adenosine, and TGF beta.

[0497] In one embodiment, the agent which inhibits an inhibitory molecule, e.g., is a molecule described herein, e.g., an agent that comprises a first polypeptide, e.g., an inhibitory molecule, associated with a second polypeptide that provides a positive signal to the cell, e.g., an intracellular signaling domain described herein. In one embodiment, the agent comprises a first polypeptide, e.g., of an inhibitory molecule such as PD1, PD-L1, CTLA4, TIM3, CEACAM (e.g., CEACAM-1, CEACAM-3 and/or CEACAM-5), LAG3, VISTA, BTLA, TIGIT, LAIR1, CD160, 2B4, CD80, CD86, B7-H3 (CD276), B7-H4 (VTCN1), HVEM (TNFRSF14 or CD270), KIR, A2aR, MHC class I, MHC class II, GAL9, adenosine, and TGF beta, or a fragment of any of these (e.g., at least a portion of an extracellular domain of any of these), and a second polypeptide which is an intracellular signaling domain described herein (e.g., comprising a costimulatory domain (e.g., 41BB, CD27 or CD28, e.g., as described herein) and/or a primary signaling domain (e.g., a CD3 zeta signaling domain described herein). In one embodiment, the agent comprises a first polypeptide of PD1 or a fragment thereof (e.g., at least a portion of an extracellular domain of PD1), and a second polypeptide of an intracellular signaling domain described herein (e.g., a CD28 signaling domain described herein and/or a CD3 zeta signaling domain described herein). PD1 is an inhibitory member of the CD28 family of receptors that also includes CD28, CTLA-4, ICOS, and BTLA. PD-1 is expressed on activated B cells, T cells and myeloid cells (Agata et al. 1996 Int. Immunol 8:765-75). Two ligands for PD1, PD-L1 and PD-L2 have been shown to downregulate T cell activation upon binding to PD1 (Freeman et a. 2000 J Exp Med 192:1027-34; Latchman et al. 2001 Nat Immunol 2:261-8; Carter et al. 2002 Eur J Immunol 32:634-43). PD-L1 is abundant in human cancers (Dong et al. 2003 J Mol Med 81:281-7; Blank et al. 2005 Cancer Immunol. Immunother 54:307-314; Konishi et al. 2004 Clin Cancer Res 10:5094). Immune suppression can be reversed by inhibiting the local interaction of PD1 with PD-L1.

[0498] In one embodiment, the agent comprises the extracellular domain (ECD) of an inhibitory molecule, e.g., Programmed Death 1 (PD1), fused to a transmembrane domain and intracellular signaling domains such as 41BB and CD3 zeta (also referred to herein as a PD1 CAR). In one embodiment, the PD1 CAR, when used in combinations with a XCAR described herein, improves the persistence of the T cell. In one embodiment, the CAR is a PD1 CAR comprising the extracellular domain of PD1 indicated as underlined in SEQ ID NO: 26. In one embodiment, the PD1 CAR comprises the amino acid sequence of SEQ ID NO:26. In one embodiment, the PD1 CAR comprises the amino acid sequence of SEQ ID NO:39).

[0499] In one embodiment, the agent comprises a nucleic acid sequence encoding the PD1 CAR, e.g., the PD1 CAR described herein. In one embodiment, the nucleic acid sequence for the PD1 CAR is shown as SEQ ID NO: 27 in Table 1, with the sequence for PD1 ECD underlined.

[0500] In another aspect, the present disclosure provides a population of CAR-expressing cells. In some embodiments, the population of CAR-expressing cells comprises a mixture of cells expressing different CARs. For example, in one embodiment, the population of CART cells can include a first cell expressing a CAR having an antigen binding domain to a tumor antigen described herein, and a second cell expressing a CAR having a different antigen binding domain, e.g., an antigen binding domain to a different tumor antigen described herein, e.g., an antigen binding domain to a tumor antigen described herein that differs from the tumor antigen bound by the antigen binding domain of the CAR expressed by the first cell. As another example, the population of CAR-expressing cells can include a first cell expressing a CAR that includes an antigen binding domain to a tumor antigen described herein, and a second cell expressing a CAR that includes an antigen binding domain to a target other than a tumor antigen as described herein. In one embodiment, the population of CAR-expressing cells includes, e.g., a first cell expressing a CAR that includes a primary intracellular signaling domain, and a second cell expressing a CAR that includes a secondary signaling domain.

[0501] In another aspect, the present disclosure provides a population of cells wherein at least one cell in the population expresses a CAR having an antigen binding domain to a tumor antigen described herein, and a second cell expressing another agent, e.g., an agent which enhances the activity of a CAR-expressing cell. For example, in one embodiment, the agent can be an agent which inhibits an inhibitory molecule. Inhibitory molecules, e.g., PD-1, can, in some embodiments, decrease the ability of a CAR-expressing cell to mount an immune effector response. Examples of inhibitory molecules include PD-1, PD-L1, CTLA4, TIM3, CEACAM (e.g., CEACAM-1, CEACAM-3 and/or CEACAM-5), LAG3, VISTA, BTLA, TIGIT, LAIR1, CD160, 2B4, CD80, CD86, B7-H3 (CD276), B7-H4 (VTCN1), HVEM (TNFRSF14 or CD270), KIR, A2aR, MHC class I, MHC class II, GAL9, adenosine, and TGF beta. In one embodiment, the agent which inhibits an inhibitory molecule, e.g., is a molecule described herein, e.g., an agent that comprises a first polypeptide, e.g., an inhibitory molecule, associated with a second polypeptide that provides a positive signal to the cell, e.g., an intracellular signaling domain described herein. In one embodiment, the agent comprises a first polypeptide, e.g., of an inhibitory molecule such as PD-1, PD-L1, CTLA4, TIM3, CEACAM (e.g., CEACAM-1, CEACAM-3 and/or CEACAM-5), LAG3, VISTA, BTLA, TIGIT, LAIR1, CD160, 2B4, CD80, CD86, B7-H3 (CD276), B7-H4 (VTCN1), HVEM (TNFRSF14 or CD270), KIR, A2aR, MHC class I, MHC class II, GAL9, adenosine, and TGF beta, or a fragment of any of these, and a second polypeptide which is an intracellular signaling domain described herein (e.g., comprising a costimulatory domain (e.g., 41BB, CD27, OX40 or CD28, e.g., as described herein) and/or a primary signaling domain (e.g., a CD3 zeta signaling domain described herein). In one embodiment, the agent comprises a first polypeptide of PD-1 or a fragment thereof, and a second polypeptide of an intracellular signaling domain described herein (e.g., a CD28 signaling domain described herein and/or a CD3 zeta signaling domain described herein).

[0502] In one aspect, the present disclosure provides methods comprising administering a population of CAR-expressing cells, e.g., a mixture of cells expressing different CARs, in combination with another agent, e.g., a kinase inhibitor, such as a kinase inhibitor described herein. In another aspect, the present disclosure provides methods comprising administering a population of cells wherein at least one cell in the population expresses a CAR having an antigen binding domain of a tumor antigen described herein, and a second cell expressing another agent, e.g., an agent which enhances the activity of a CAR-expressing cell, in combination with another agent, e.g., a kinase inhibitor, such as a kinase inhibitor described herein.

[0503] Natural Killer Cell Receptor (NKR) CARs

[0504] In an embodiment, the CAR molecule described herein, e.g., the CAR molecule that targets a tumor antigen, e.g., a solid tumor antigen or antigen expressed on a tumor associated with MDSCs or TAMs, comprises one or more components of a natural killer cell receptor (NKR), thereby forming an NKR-CAR. The NKR component can be a transmembrane domain, a hinge domain, or a cytoplasmic domain from any of the following natural killer cell receptors: killer cell immunoglobulin-like receptor (KIR), e.g., KIR2DL1, KIR2DL2/L3, KIR2DL4, KIR2DL5A, KIR2DL5B, KIR2DS1, KIR2DS2, KIR2DS3, KIR2DS4, DIR2DS5, KIR3DL1/S1, KIR3DL2, KIR3DL3, KIR2DP1, and KIR3DP1; natural cyotoxicity receptor (NCR), e.g., NKp30, NKp44, NKp46; signaling lymphocyte activation molecule (SLAM) family of immune cell receptors, e.g., CD48, CD229, 2B4, CD84, NTB-A, CRACC, BLAME, and CD2F-10; Fc receptor (FcR), e.g., CD16, and CD64; and Ly49 receptors, e.g., LY49A, LY49C. The NKR-CAR molecules described herein may interact with an adaptor molecule or intracellular signaling domain, e.g., DAP12. Exemplary configurations and sequences of CAR molecules comprising NKR components are described in International Publication No. WO2014/145252, the contents of which are hereby incorporated by reference.

[0505] Split CAR

[0506] In some embodiments, the CAR-expressing cell uses a split CAR. The split CAR approach is described in more detail in publications WO2014/055442 and WO2014/055657, incorporated herein by reference. Briefly, a split CAR system comprises a cell expressing a first CAR having a first antigen binding domain and a costimulatory domain (e.g., 41BB), and the cell also expresses a second CAR having a second antigen binding domain and an intracellular signaling domain (e.g., CD3 zeta). When the cell encounters the first antigen, the costimulatory domain is activated, and the cell proliferates. When the cell encounters the second antigen, the intracellular signaling domain is activated and cell-killing activity begins. Thus, the CAR-expressing cell is only fully activated in the presence of both antigens. In embodiments the first antigen binding domain recognizes the tumor antigen or B cell antigen described herein, e.g., comprises an antigen binding domain described herein, and the second antigen binding domain recognizes a second antigen, e.g., a second tumor antigen or a second B cell antigen described herein.

[0507] Strategies for Regulating Chimeric Antigen Receptors

[0508] There are many ways CAR activities can be regulated. In some embodiments, a regulatable CAR (RCAR) where the CAR activity can be controlled is desirable to optimize the safety and efficacy of a CAR therapy. For example, inducing apoptosis using, e.g., a caspase fused to a dimerization domain (see, e.g., Di et al., N Engl. J. Med. 2011 Nov. 3; 365(18):1673-1683), can be used as a safety switch in the CAR therapy of the instant invention. In another example, CAR-expressing cells can also express an inducible Caspase-9 (iCaspase-9) molecule that, upon administration of a dimerizer drug (e.g., rimiducid (also called AP1903 (Bellicum Pharmaceuticals) or AP20187 (Ariad)) leads to activation of the Caspase-9 and apoptosis of the cells. The iCaspase-9 molecule contains a chemical inducer of dimerization (CID) binding domain that mediates dimerization in the presence of a CID. This results in inducible and selective depletion of CAR-expressing cells. In some cases, the iCaspase-9 molecule is encoded by a nucleic acid molecule separate from the CAR-encoding vector(s). In some cases, the iCaspase-9 molecule is encoded by the same nucleic acid molecule as the CAR-encoding vector. The iCaspase-9 can provide a safety switch to avoid any toxicity of CAR-expressing cells. See, e.g., Song et al. Cancer Gene Ther. 2008; 15(10):667-75; Clinical Trial Id. No. NCT02107963; and Di Stasi et al. N. Engl. J. Med. 2011; 365:1673-83.

[0509] Alternative strategies for regulating the CAR therapy of the instant invention include utilizing small molecules or antibodies that deactivate or turn off CAR activity, e.g., by deleting CAR-expressing cells, e.g., by inducing antibody dependent cell-mediated cytotoxicity (ADCC). For example, CAR-expressing cells described herein may also express an antigen that is recognized by molecules capable of inducing cell death, e.g., ADCC or complement-induced cell death. For example, CAR expressing cells described herein may also express a receptor capable of being targeted by an antibody or antibody fragment. Examples of such receptors include EpCAM, VEGFR, integrins (e.g., integrins αvβ3, α4, aI¾β3, α4β7, α5β1, αvβ3, αv), members of the TNF receptor superfamily (e.g., TRAIL-R1, TRAIL-R2), PDGF Receptor, interferon receptor, folate receptor, GPNMB, ICAM-1, HLA-DR, CEA, CA-125, MUC1, TAG-72, IL-6 receptor, 5T4, GD2, GD3, CD2, CD3, CD4, CD5, CD1 1, CD1 1 a/LFA-1, CD15, CD18/ITGB2, CD19, CD20, CD22, CD23/1gE Receptor, CD25, CD28, CD30, CD33, CD38, CD40, CD41, CD44, CD51, CD52, CD62L, CD74, CD80, CD125, CD147/basigin, CD152/CTLA-4, CD154/CD40L, CD195/CCR5, CD319/SLAMF7, and EGFR, and truncated versions thereof (e.g., versions preserving one or more extracellular epitopes but lacking one or more regions within the cytoplasmic domain).

[0510] For example, a CAR-expressing cell described herein may also express a truncated epidermal growth factor receptor (EGFR) which lacks signaling capacity but retains the epitope that is recognized by molecules capable of inducing ADCC, e.g., cetuximab (ERBITUX®), such that administration of cetuximab induces ADCC and subsequent depletion of the CAR-expressing cells (see, e.g., WO2011/056894, and Jonnalagadda et al., Gene Ther. 2013; 20(8)853-860). Another strategy includes expressing a highly compact marker/suicide gene that combines target epitopes from both CD32 and CD20 antigens in the CAR-expressing cells described herein, which binds rituximab, resulting in selective depletion of the CAR-expressing cells, e.g., by ADCC (see, e.g., Philip et al., Blood. 2014; 124(8)1277-1287). Other methods for depleting CAR-expressing cells described herein include administration of CAMPATH, a monoclonal anti-CD52 antibody that selectively binds and targets mature lymphocytes, e.g., CAR-expressing cells, for destruction, e.g., by inducing ADCC. In other embodiments, the CAR-expressing cell can be selectively targeted using a CAR ligand, e.g., an anti-idiotypic antibody. In some embodiments, the anti-idiotypic antibody can cause effector cell activity, e.g, ADCC or ADC activities, thereby reducing the number of CAR-expressing cells. In other embodiments, the CAR ligand, e.g., the anti-idiotypic antibody, can be coupled to an agent that induces cell killing, e.g., a toxin, thereby reducing the number of CAR-expressing cells. Alternatively, the CAR molecules themselves can be configured such that the activity can be regulated, e.g., turned on and off, as described below.

[0511] In other embodiments, a CAR-expressing cell described herein may also express a target protein recognized by the T cell depleting agent. In one embodiment, the target protein is CD20 and the T cell depleting agent is an anti-CD20 antibody, e.g., rituximab. In such embodiment, the T cell depleting agent is administered once it is desirable to reduce or eliminate the CAR-expressing cell, e.g., to mitigate the CAR induced toxicity. In other embodiments, the T cell depleting agent is an anti-CD52 antibody, e.g., alemtuzumab.

[0512] In other embodiments, a RCAR comprises a set of polypeptides, typically two in the simplest embodiments, in which the components of a standard CAR described herein, e.g., an antigen binding domain and an intracellular signaling domain, are partitioned on separate polypeptides or members. In some embodiments, the set of polypeptides include a dimerization switch that, upon the presence of a dimerization molecule, can couple the polypeptides to one another, e.g., can couple an antigen binding domain to an intracellular signaling domain. Additional description and exemplary configurations of such regulatable CARs are provided herein and in International Publication No. WO 2015/090229, hereby incorporated by reference in its entirety.

[0513] Co-Expression of CAR with a Chemokine Receptor

[0514] In embodiments, the CAR-expressing cell described herein further comprises a chemokine receptor molecule. Transgenic expression of chemokine receptors CCR2b or CXCR2 in T cells enhances trafficking to CCL2- or CXCL1-secreting solid tumors including melanoma and neuroblastoma (Craddock et al., J Immunother. 2010 October; 33(8):780-8 and Kershaw et al., Hum Gene Ther. 2002 Nov. 1; 13(16):1971-80). Thus, without wishing to be bound by theory, it is believed that chemokine receptors expressed in CAR-expressing cells that recognize chemokines secreted by tumors, e.g., solid tumors, can improve homing of the CAR-expressing cell to the tumor, facilitate the infiltration of the CAR-expressing cell to the tumor, and enhances antitumor efficacy of the CAR-expressing cell. The chemokine receptor molecule can comprise a naturally occurring or recombinant chemokine receptor or a chemokine-binding fragment thereof. A chemokine receptor molecule suitable for expression in a CAR-expressing cell described herein include a CXC chemokine receptor (e.g., CXCR1, CXCR2, CXCR3, CXCR4, CXCR5, CXCR6, or CXCR7), a CC chemokine receptor (e.g., CCR1, CCR2, CCR3, CCR4, CCR5, CCR6, CCR7, CCR8, CCR9, CCR10, or CCR11), a CX3C chemokine receptor (e.g., CX3CR1), a XC chemokine receptor (e.g., XCR1), or a chemokine-binding fragment thereof. In one embodiment, the chemokine receptor molecule to be expressed with a CAR described herein is selected based on the chemokine(s) secreted by the tumor. In one embodiment, the CAR-expressing cell described herein further comprises, e.g., expresses, a CCR2b receptor or a CXCR2 receptor. In an embodiment, the CAR described herein and the chemokine receptor molecule are on the same vector or are on two different vectors. In embodiments where the CAR described herein and the chemokine receptor molecule are on the same vector, the CAR and the chemokine receptor molecule are each under control of two different promoters or are under the control of the same promoter.

[0515] Nucleic Acid Constructs Encoding a CAR

[0516] The present disclosure also provides nucleic acid molecules encoding one or more of the CAR constructs targeting a tumor antigen and/or a B cell antigen described herein. In one aspect, the nucleic acid molecule is provided as a messenger RNA transcript. In one aspect, the nucleic acid molecule is provided as a DNA construct.

[0517] Accordingly, in one aspect, the invention pertains to a nucleic acid molecule encoding a chimeric antigen receptor (CAR), wherein the CAR comprises an antigen binding domain that binds to a tumor antigen, e.g., a solid tumor antigen or antigen expressed on a tumor associated with MDSCs or TAMs, a transmembrane domain (e.g., a transmembrane domain described herein), and an intracellular signaling domain (e.g., an intracellular signaling domain described herein) comprising a stimulatory domain, e.g., a costimulatory signaling domain (e.g., a costimulatory signaling domain described herein) and/or a primary signaling domain (e.g., a primary signaling domain described herein, e.g., a zeta chain described herein). In one embodiment, the transmembrane domain is transmembrane domain of a protein selected from the group consisting of the alpha, beta or zeta chain of the T-cell receptor, CD28, CD3 epsilon, CD45, CD4, CD5, CD8, CD9, CD16, CD22, CD33, CD37, CD64, CD80, CD86, CD134, CD137 and CD154. In some embodiments, a transmembrane domain may include at least the transmembrane region(s) of, e.g., KIRDS2, OX40, CD2, CD27, LFA-1 (CD11a, CD18), ICOS (CD278), 4-1BB (CD137), GITR, CD40, BAFFR, HVEM (LIGHTR), SLAMF7, NKp80 (KLRF1), NKp44, NKp30, NKp46, CD160, CD19, IL2R beta, IL2R gamma, IL7R a, ITGA1, VLA1, CD49a, ITGA4, IA4, CD49D, ITGA6, VLA-6, CD49f, ITGAD, CD11d, ITGAE, CD103, ITGAL, CD11a, LFA-1, ITGAM, CD11b, ITGAX, CD11c, ITGB1, CD29, ITGB2, CD18, LFA-1, ITGB7, NKG2D, NKG2C, TNFR2, DNAM1 (CD226), SLAMF4 (CD244, 2B4), CD84, CD96 (Tactile), CEACAM1, CRTAM, Ly9 (CD229), CD160 (BY55), PSGL1, CD100 (SEMA4D), SLAMF6 (NTB-A, Ly108), SLAM (SLAMF1, CD150, IPO-3), BLAME (SLAMF8), SELPLG (CD162), LTBR, PAG/Cbp, NKG2D, and NKG2C.

[0518] In one embodiment, the transmembrane domain comprises a sequence of SEQ ID NO: 12, or a sequence with 95-99% identity thereof. In one embodiment, the antigen binding domain is connected to the transmembrane domain by a hinge region, e.g., a hinge described herein. In one embodiment, the hinge region comprises SEQ ID NO:4 or SEQ ID NO:6 or SEQ ID NO:8 or SEQ ID NO:10, or a sequence with 95-99% identity thereof. In one embodiment, the isolated nucleic acid molecule further comprises a sequence encoding a costimulatory domain. In one embodiment, the costimulatory domain is a functional signaling domain of a protein selected from the group consisting of OX40, CD27, CD28, CDS, ICAM-1, LFA-1 (CD11a/CD18), ICOS (CD278), and 4-1BB (CD137). Further examples of such costimulatory molecules include CDS, ICAM-1, GITR, BAFFR, HVEM (LIGHTR), SLAMF7, NKp80 (KLRF1), NKp44, NKp30, NKp46, CD160, CD19, CD4, CD8alpha, CD8beta, IL2R beta, IL2R gamma, IL7R alpha, ITGA4, VLA1, CD49a, ITGA4, IA4, CD49D, ITGA6, VLA-6, CD49f, ITGAD, CD11d, ITGAE, CD103, ITGAL, CD11a, LFA-1, ITGAM, CD11b, ITGAX, CD11c, ITGB1, CD29, ITGB2, CD18, LFA-1, ITGB7, NKG2D, NKG2C, TNFR2, TRANCE/RANKL, DNAM1 (CD226), SLAMF4 (CD244, 2B4), CD84, CD96 (Tactile), CEACAM1, CRTAM, Ly9 (CD229), CD160 (BY55), PSGL1, CD100 (SEMA4D), CD69, SLAMF6 (NTB-A, Ly108), SLAM (SLAMF1, CD150, IPO-3), BLAME (SLAMF8), SELPLG (CD162), LTBR, LAT, GADS, SLP-76, PAG/Cbp, NKG2D, and NKG2C. In one embodiment, the costimulatory domain comprises a sequence of SEQ ID NO:16, or a sequence with 95-99% identity thereof. In one embodiment, the intracellular signaling domain comprises a functional signaling domain of 4-1BB and a functional signaling domain of CD3 zeta. In one embodiment, the intracellular signaling domain comprises the sequence of SEQ ID NO: 14 or SEQ ID NO:16, 42, or 44, or a sequence with 95-99% identity thereof, and the sequence of SEQ ID NO: 18 or SEQ ID NO:20, or a sequence with 95-99% identity thereof, wherein the sequences comprising the intracellular signaling domain are expressed in the same frame and as a single polypeptide chain.

[0519] In another aspect, the invention pertains to an isolated nucleic acid molecule encoding a CAR construct comprising a leader sequence of SEQ ID NO: 2, a scFv domain as described herein, a hinge region of SEQ ID NO:4 or SEQ ID NO:6 or SEQ ID NO:8 or SEQ ID NO:10 (or a sequence with 95-99% identity thereof), a transmembrane domain having a sequence of SEQ ID NO: 12 (or a sequence with 95-99% identity thereof), a 4-1BB costimulatory domain having a sequence of SEQ ID NO:14, a CD27 costimulatory domain having a sequence of SEQ ID NO:16 (or a sequence with 95-99% identity thereof), a ICOS costimulatory domain having a sequence of SEQ ID NO: 42 (or a sequence with 95-99% identity thereof) or a CD28 costimulatory domain having a sequence of SEQ ID NO:44, and a CD3 zeta stimulatory domain having a sequence of SEQ ID NO:18 or SEQ ID NO:20 (or a sequence with 95-99% identity thereof).

[0520] The nucleic acid sequences coding for the desired molecules can be obtained using recombinant methods known in the art, such as, for example by screening libraries from cells expressing the gene, by deriving the gene from a vector known to include the same, or by isolating directly from cells and tissues containing the same, using standard techniques. Alternatively, the gene of interest can be produced synthetically, rather than cloned.

[0521] The present disclosure also provides vectors in which a nucleic acid of the present disclosure is inserted. Vectors derived from retroviruses such as the lentivirus are suitable tools to achieve long-term gene transfer since they allow long-term, stable integration of a transgene and its propagation in daughter cells. Lentiviral vectors have the added advantage over vectors derived from onco-retroviruses such as murine leukemia viruses in that they can transduce non-proliferating cells, such as hepatocytes. They also have the added advantage of low immunogenicity.

[0522] In another embodiment, the vector comprising the nucleic acid encoding the desired CAR of the invention is an adenoviral vector (A5/35). In another embodiment, the expression of nucleic acids encoding CARs can be accomplished using of transposons such as sleeping beauty, crisper, CAS9, and zinc finger nucleases. See below June et al. 2009Nature Reviews Immunology 9.10: 704-716, is incorporated herein by reference.

[0523] In brief summary, the expression of natural or synthetic nucleic acids encoding CARs is typically achieved by operably linking a nucleic acid encoding the CAR polypeptide or portions thereof to a promoter, and incorporating the construct into an expression vector. The vectors can be suitable for replication and integration eukaryotes. Typical cloning vectors contain transcription and translation terminators, initiation sequences, and promoters useful for regulation of the expression of the desired nucleic acid sequence.

[0524] The expression constructs of the present disclosure may also be used for nucleic acid immunization and gene therapy, using standard gene delivery protocols. Methods for gene delivery are known in the art. See, e.g., U.S. Pat. Nos. 5,399,346, 5,580,859, 5,589,466, incorporated by reference herein in their entireties. In another embodiment, the invention provides a gene therapy vector.

[0525] The nucleic acid can be cloned into a number of types of vectors. For example, the nucleic acid can be cloned into a vector including, but not limited to a plasmid, a phagemid, a phage derivative, an animal virus, and a cosmid. Vectors of particular interest include expression vectors, replication vectors, probe generation vectors, and sequencing vectors.

[0526] Further, the expression vector may be provided to a cell in the form of a viral vector. Viral vector technology is well known in the art and is described, for example, in Sambrook et al., 2012, MOLECULAR CLONING: A LABORATORY MANUAL, volumes 1-4, Cold Spring Harbor Press, NY), and in other virology and molecular biology manuals. Viruses, which are useful as vectors include, but are not limited to, retroviruses, adenoviruses, adeno-associated viruses, herpes viruses, and lentiviruses. In general, a suitable vector contains an origin of replication functional in at least one organism, a promoter sequence, convenient restriction endonuclease sites, and one or more selectable markers, (e.g., WO 01/96584; WO 01/29058; and U.S. Pat. No. 6,326,193).

[0527] A number of viral based systems have been developed for gene transfer into mammalian cells. For example, retroviruses provide a convenient platform for gene delivery systems. A selected gene can be inserted into a vector and packaged in retroviral particles using techniques known in the art. The recombinant virus can then be isolated and delivered to cells of the subject either in vivo or ex vivo. A number of retroviral systems are known in the art. In some embodiments, adenovirus vectors are used. A number of adenovirus vectors are known in the art. In one embodiment, lentivirus vectors are used.

[0528] Additional promoter elements, e.g., enhancers, regulate the frequency of transcriptional initiation. Typically, these are located in the region 30-110 bp upstream of the start site, although a number of promoters have been shown to contain functional elements downstream of the start site as well. The spacing between promoter elements frequently is flexible, so that promoter function is preserved when elements are inverted or moved relative to one another. In the thymidine kinase (tk) promoter, the spacing between promoter elements can be increased to 50 bp apart before activity begins to decline. Depending on the promoter, it appears that individual elements can function either cooperatively or independently to activate transcription. Exemplary promoters include the CMV IE gene, EF-1a, ubiquitin C, or phosphoglycerokinase (PGK) promoters.

[0529] An example of a promoter that is capable of expressing a CAR encoding nucleic acid molecule in a mammalian T cell is the EF1a promoter. The native EF1a promoter drives expression of the alpha subunit of the elongation factor-1 complex, which is responsible for the enzymatic delivery of aminoacyl tRNAs to the ribosome. The EF1a promoter has been extensively used in mammalian expression plasmids and has been shown to be effective in driving CAR expression from nucleic acid molecules cloned into a lentiviral vector. See, e.g., Milone et al., Mol. Ther. 17(8): 1453-1464 (2009). In one aspect, the EF1a promoter comprises the sequence provided as SEQ ID NO:1.

[0530] Another example of a promoter is the immediate early cytomegalovirus (CMV) promoter sequence. This promoter sequence is a strong constitutive promoter sequence capable of driving high levels of expression of any polynucleotide sequence operatively linked thereto. However, other constitutive promoter sequences may also be used, including, but not limited to the simian virus 40 (SV40) early promoter, mouse mammary tumor virus (MMTV), human immunodeficiency virus (HIV) long terminal repeat (LTR) promoter, MoMuLV promoter, an avian leukemia virus promoter, an Epstein-Barr virus immediate early promoter, a Rous sarcoma virus promoter, as well as human gene promoters such as, but not limited to, the actin promoter, the myosin promoter, the elongation factor-1a promoter, the hemoglobin promoter, and the creatine kinase promoter. Further, the invention should not be limited to the use of constitutive promoters. Inducible promoters are also contemplated as part of the invention. The use of an inducible promoter provides a molecular switch capable of turning on expression of the polynucleotide sequence which it is operatively linked when such expression is desired, or turning off the expression when expression is not desired. Examples of inducible promoters include, but are not limited to a metallothionine promoter, a glucocorticoid promoter, a progesterone promoter, and a tetracycline promoter.

[0531] Another example of a promoter is the phosphoglycerate kinase (PGK) promoter. In embodiments, a truncated PGK promoter (e.g., a PGK promoter with one or more, e.g., 1, 2, 5, 10, 100, 200, 300, or 400, nucleotide deletions when compared to the wild-type PGK promoter sequence) may be desired. The nucleotide sequences of exemplary PGK promoters are provided below.

WT PGK Promoter

(SEQ ID NO: 101)

ACCCCTCTCTCCAGCCACTAAGCCAGTTGCTCCCTCGGCTGACGGCTGCA
CGCGAGGCCTCCGAACGTCTTACGCCTTGTGGCGCGCCCGTCCTTGTCCC
GGGTGTGATGGCGGGGTGTGGGGCGGAGGGCGTGGCGGGGAAGGGCCGGC
GACGAGAGCCGCGCGGGACGACTCGTCGGCGATAACCGGTGTCGGGTAGC
GCCAGCCGCGCGACGGTAACGAGGGACCGCGACAGGCAGACGCTCCCATG
ATCACTCTGCACGCCGAAGGCAAATAGTGCAGGCCGTGCGGCGCTTGGCG
TTCCTTGGAAGGGCTGAATCCCCGCCTCGTCCTTCGCAGCGGCCCCCCGG
GTGTTCCCATCGCCGCTTCTAGGCCCACTGCGACGCTTGCCTGCACTTCT
TACACGCTCTGGGTCCCAGCCGCGGCGACGCAAAGGGCCTTGGTGCGGGT
CTCGTCGGCGCAGGGACGCGTTTGGGTCCCGACGGAACCTTTTCCGCGTT
GGGGTTGGGGCACCATAAGCT

[0532] Exemplary Truncated PGK Promoters:

PGK100:

(SEQ ID NO: 102)

ACCCCTCTCTCCAGCCACTAAGCCAGTTGCTCCCTCGGCTGACGGCTGCA
CGCGAGGCCTCCGAACGTCTTACGCCTTGTGGCGCGCCCGTCCTTGTCCC
GGGTGTGATGGCGGGGTG
PGK200:

(SEQ ID NO: 103)

ACCCCTCTCTCCAGCCACTAAGCCAGTTGCTCCCTCGGCTGACGGCTGCA
CGCGAGGCCTCCGAACGTCTTACGCCTTGTGGCGCGCCCGTCCTTGTCCC
GGGTGTGATGGCGGGGTGTGGGGCGGAGGGCGTGGCGGGGAAGGGCCGGC
GACGAGAGCCGCGCGGGACGACTCGTCGGCGATAACCGGTGTCGGGTAGC
GCCAGCCGCGCGACGGTAACG
PGK300:

(SEQ ID NO: 104)

ACCCCTCTCTCCAGCCACTAAGCCAGTTGCTCCCTCGGCTGACGGCTGCA
CGCGAGGCCTCCGAACGTCTTACGCCTTGTGGCGCGCCCGTCCTTGTCCC
GGGTGTGATGGCGGGGTGTGGGGCGGAGGGCGTGGCGGGGAAGGGCCGGC
GACGAGAGCCGCGCGGGACGACTCGTCGGCGATAACCGGTGTCGGGTAGC
GCCAGCCGCGCGACGGTAACGAGGGACCGCGACAGGCAGACGCTCCCATG
ATCACTCTGCACGCCGAAGGCAAATAGTGCAGGCCGTGCGGCGCTTGGCG
TTCCTTGGAAGGGCTGAATCCCCG
PGK400:

(SEQ ID NO: 105)

ACCCCTCTCTCCAGCCACTAAGCCAGTTGCTCCCTCGGCTGACGGCTGCA
CGCGAGGCCTCCGAACGTCTTACGCCTTGTGGCGCGCCCGTCCTTGTCCC
GGGTGTGATGGCGGGGTGTGGGGCGGAGGGCGTGGCGGGGAAGGGCCGGC
GACGAGAGCCGCGCGGGACGACTCGTCGGCGATAACCGGTGTCGGGTAGC
GCCAGCCGCGCGACGGTAACGAGGGACCGCGACAGGCAGACGCTCCCATG
ATCACTCTGCACGCCGAAGGCAAATAGTGCAGGCCGTGCGGCGCTTGGCG
TTCCTTGGAAGGGCTGAATCCCCGCCTCGTCCTTCGCAGCGGCCCCCCGG
GTGTTCCCATCGCCGCTTCTAGGCCCACTGCGACGCTTGCCTGCACTTCT
TACACGCTCTGGGTCCCAGCCG

[0533] A vector may also include, e.g., a signal sequence to facilitate secretion, a polyadenylation signal and transcription terminator (e.g., from Bovine Growth Hormone (BGH) gene), an element allowing episomal replication and replication in prokaryotes (e.g. SV40 origin and ColE1 or others known in the art) and/or elements to allow selection (e.g., ampicillin resistance gene and/or zeocin marker).

[0534] In order to assess the expression of a CAR polypeptide or portions thereof, the expression vector to be introduced into a cell can also contain either a selectable marker gene or a reporter gene or both to facilitate identification and selection of expressing cells from the population of cells sought to be transfected or infected through viral vectors. In other aspects, the selectable marker may be carried on a separate piece of DNA and used in a co-transfection procedure. Both selectable markers and reporter genes may be flanked with appropriate regulatory sequences to enable expression in the host cells. Useful selectable markers include, for example, antibiotic-resistance genes, such as neo and the like.

[0535] Reporter genes are used for identifying potentially transfected cells and for evaluating the functionality of regulatory sequences. In general, a reporter gene is a gene that is not present in or expressed by the recipient organism or tissue and that encodes a polypeptide whose expression is manifested by some easily detectable property, e.g., enzymatic activity. Expression of the reporter gene is assayed at a suitable time after the DNA has been introduced into the recipient cells. Suitable reporter genes may include genes encoding luciferase, beta-galactosidase, chloramphenicol acetyl transferase, secreted alkaline phosphatase, or the green fluorescent protein gene (e.g., Ui-Tei et al., 2000 FEBS Letters 479: 79-82). Suitable expression systems are well known and may be prepared using known techniques or obtained commercially. In general, the construct with the minimal 5′ flanking region showing the highest level of expression of reporter gene is identified as the promoter. Such promoter regions may be linked to a reporter gene and used to evaluate agents for the ability to modulate promoter-driven transcription.

[0536] In some embodiments, the a vector comprising a nuclei acid sequence encoding a CAR molecule described herein can further comprises a second nucleic acid sequence encoding a polypeptide, e.g., an agent that increases the activity of the CAR molecule. In other embodiments, the two or more nucleic acid sequences are encoded by a single nucleic molecule in the same frame and as a single polypeptide chain. In this aspect, the two or more CARs can, e.g., be separated by one or more peptide cleavage sites. (e.g., an auto-cleavage site or a substrate for an intracellular protease). Examples of peptide cleavage sites include the following, wherein the GSG residues are optional:

T2A:

(SEQ ID NO: 106)

(GSG) E G R G S L L T C G D V E E N P G P
P2A:

(SEQ ID NO: 107)

(GSG) A T N F S L L K Q A G D V E E N P G P
E2A:

(SEQ ID NO: 108)

(GSG) Q C T N Y A L L K L A G D V E S N P G P
F2A:

(SEQ ID NO: 109)

(GSG) V K Q T L N F D L L K L A G D V E S N P G P

[0537] Methods of introducing and expressing genes into a cell are known in the art. In the context of an expression vector, the vector can be readily introduced into a host cell, e.g., mammalian, bacterial, yeast, or insect cell by any method in the art. For example, the expression vector can be transferred into a host cell by physical, chemical, or biological means.

[0538] Physical methods for introducing a polynucleotide into a host cell include calcium phosphate precipitation, lipofection, particle bombardment, microinjection, electroporation, and the like. Methods for producing cells comprising vectors and/or exogenous nucleic acids are well-known in the art. See, for example, Sambrook et al., 2012, MOLECULAR CLONING: A LABORATORY MANUAL, volumes 1-4, Cold Spring Harbor Press, NY). A preferred method for the introduction of a polynucleotide into a host cell is calcium phosphate transfection or electroporation.

[0539] Biological methods for introducing a polynucleotide of interest into a host cell include the use of DNA and RNA vectors. Viral vectors, and especially retroviral vectors, have become the most widely used method for inserting genes into mammalian, e.g., human cells. Other viral vectors can be derived from lentivirus, poxviruses, herpes simplex virus I, adenoviruses and adeno-associated viruses, and the like. See, for example, U.S. Pat. Nos. 5,350,674 and 5,585,362.

[0540] Chemical means for introducing a polynucleotide into a host cell include colloidal dispersion systems, such as macromolecule complexes, nanocapsules, microspheres, beads, and lipid-based systems including oil-in-water emulsions, micelles, mixed micelles, and liposomes. An exemplary colloidal system for use as a delivery vehicle in vitro and in vivo is a liposome (e.g., an artificial membrane vesicle). Other methods of state-of-the-art targeted delivery of nucleic acids are available, such as delivery of polynucleotides with targeted nanoparticles or other suitable sub-micron sized delivery system.

[0541] In the case where a non-viral delivery system is utilized, an exemplary delivery vehicle is a liposome. The use of lipid formulations is contemplated for the introduction of the nucleic acids into a host cell (in vitro, ex vivo or in vivo). In another aspect, the nucleic acid may be associated with a lipid. The nucleic acid associated with a lipid may be encapsulated in the aqueous interior of a liposome, interspersed within the lipid bilayer of a liposome, attached to a liposome via a linking molecule that is associated with both the liposome and the oligonucleotide, entrapped in a liposome, complexed with a liposome, dispersed in a solution containing a lipid, mixed with a lipid, combined with a lipid, contained as a suspension in a lipid, contained or complexed with a micelle, or otherwise associated with a lipid. Lipid, lipid/DNA or lipid/expression vector associated compositions are not limited to any particular structure in solution. For example, they may be present in a bilayer structure, as micelles, or with a “collapsed” structure. They may also simply be interspersed in a solution, possibly forming aggregates that are not uniform in size or shape. Lipids are fatty substances which may be naturally occurring or synthetic lipids. For example, lipids include the fatty droplets that naturally occur in the cytoplasm as well as the class of compounds which contain long-chain aliphatic hydrocarbons and their derivatives, such as fatty acids, alcohols, amines, amino alcohols, and aldehydes.

[0542] Lipids suitable for use can be obtained from commercial sources. For example, dimyristyl phosphatidylcholine (“DMPC”) can be obtained from Sigma, St. Louis, Mo.; dicetyl phosphate (“DCP”) can be obtained from K & K Laboratories (Plainview, N.Y.); cholesterol (“Choi”) can be obtained from Calbiochem-Behring; dimyristyl phosphatidylglycerol (“DMPG”) and other lipids may be obtained from Avanti Polar Lipids, Inc. (Birmingham, Ala.). Stock solutions of lipids in chloroform or chloroform/methanol can be stored at about −20° C. Chloroform is used as the only solvent since it is more readily evaporated than methanol. “Liposome” is a generic term encompassing a variety of single and multilamellar lipid vehicles formed by the generation of enclosed lipid bilayers or aggregates. Liposomes can be characterized as having vesicular structures with a phospholipid bilayer membrane and an inner aqueous medium. Multilamellar liposomes have multiple lipid layers separated by aqueous medium. They form spontaneously when phospholipids are suspended in an excess of aqueous solution. The lipid components undergo self-rearrangement before the formation of closed structures and entrap water and dissolved solutes between the lipid bilayers (Ghosh et al., 1991 Glycobiology 5: 505-10). However, compositions that have different structures in solution than the normal vesicular structure are also encompassed. For example, the lipids may assume a micellar structure or merely exist as nonuniform aggregates of lipid molecules. Also contemplated are lipofectamine-nucleic acid complexes.

[0543] Regardless of the method used to introduce exogenous nucleic acids into a host cell or otherwise expose a cell to the inhibitor of the present disclosure, in order to confirm the presence of the recombinant DNA sequence in the host cell, a variety of assays may be performed. Such assays include, for example, “molecular biological” assays well known to those of skill in the art, such as Southern and Northern blotting, RT-PCR and PCR; “biochemical” assays, such as detecting the presence or absence of a particular peptide, e.g., by immunological means (ELISAs and Western blots) or by assays described herein to identify agents falling within the scope of the invention.

[0544] The present disclosure further provides a vector comprising a CAR encoding nucleic acid molecule. In one embodiment, the vector comprises a CAR encoding nucleic acid molecule, e.g., as described herein. In one aspect, the one or more CAR vectors can be directly transduced into a cell, e.g., a T cell or a NK cell. In one aspect, the vector is a cloning or expression vector, e.g., a vector including, but not limited to, one or more plasmids (e.g., expression plasmids, cloning vectors, minicircles, minivectors, double minute chromosomes), retroviral and lentiviral vector constructs. In one aspect, the vector is capable of expressing the CAR construct in mammalian immune effector cells (e.g., T cells, NK cells).

[0545] In one embodiment, where stable expression of a CAR is desired, a vector comprising a CAR-encoding nucleic acid molecule is transduced into an immune effector cell. For example, immune effector cells with stable expression of a CAR can be generated using lentiviral vectors. Cells that exhibit stable expression of a CAR express the CAR for at least 1 week, 2 weeks, 3 weeks, 4 weeks, 5 weeks, 6 weeks, 7 weeks, 8 weeks, 3 months, 6 months, 9 months, or 12 months after transduction.

[0546] In one embodiment, where transient expression of a CAR is desired, a CAR-encoding nucleic acid molecule is transfected into an immune effector cell. The CAR-encoding nucleic acid molecule may be a vector comprising a CAR encoding nucleic acid molecule, or an in vitro transcribed RNA encoding CAR. In vitro transcribed RNA CARs and methods for transfection into immune effector cells are further described below. Cells that exhibit transient expression of a CAR express the CAR for 4, 5, 6, 7, 8, 9, 10, 11, 12, 13, 14, 15 days after transfection.

[0547] RNA Transfection

[0548] Disclosed herein are methods for producing an in vitro transcribed RNA CAR, e.g., an in vitro transcribed RNA CAR. The present disclosure also includes a CAR encoding RNA construct that can be directly transfected into a cell. A method for generating mRNA for use in transfection can involve in vitro transcription (IVT) of a template with specially designed primers, followed by polyA addition, to produce a construct containing 3′ and 5′ untranslated sequence (“UTR”), a 5′ cap and/or Internal Ribosome Entry Site (IRES), the nucleic acid to be expressed, and a polyA tail, typically 50-2000 bases in length (SEQ ID NO:32). RNA so produced can efficiently transfect different kinds of cells. In one aspect, the template includes sequences for the CAR.

[0549] In one aspect, a CAR of the present disclosure is encoded by a messenger RNA (mRNA). In one aspect, the mRNA encoding a CAR described herein is introduced into a T cell or a NK cell for production of a cell that expresses a CAR.

[0550] In one embodiment, the in vitro transcribed RNA CAR can be introduced to a cell as a form of transient transfection. The RNA is produced by in vitro transcription using a polymerase chain reaction (PCR)-generated template. DNA of interest from any source can be directly converted by PCR into a template for in vitro mRNA synthesis using appropriate primers and RNA polymerase. The source of the DNA can be, for example, genomic DNA, plasmid DNA, phage DNA, cDNA, synthetic DNA sequence or any other appropriate source of DNA. The desired template for in vitro transcription is a CAR described herein. For example, the template for the RNA CAR comprises an extracellular region comprising a single chain variable domain of an antibody to a tumor antigen, e.g., a solid tumor antigen or antigen expressed on a tumor associated with MDSCs or TAMs, a hinge region (e.g., a hinge region described herein), a transmembrane domain (e.g., a transmembrane domain described herein such as a transmembrane domain of CD8a); and a cytoplasmic region that includes an intracellular signaling domain, e.g., an intracellular signaling domain described herein, e.g., comprising the signaling domain of CD3-zeta and the signaling domain of 4-1BB.

[0551] In one embodiment, the DNA to be used for PCR contains an open reading frame. The DNA can be from a naturally occurring DNA sequence from the genome of an organism. In one embodiment, the nucleic acid can include some or all of the 5′ and/or 3′ untranslated regions (UTRs). The nucleic acid can include exons and introns. In one embodiment, the DNA to be used for PCR is a human nucleic acid sequence. In another embodiment, the DNA to be used for PCR is a human nucleic acid sequence including the 5′ and 3′ UTRs. The DNA can alternatively be an artificial DNA sequence that is not normally expressed in a naturally occurring organism. An exemplary artificial DNA sequence is one that contains portions of genes that are ligated together to form an open reading frame that encodes a fusion protein. The portions of DNA that are ligated together can be from a single organism or from more than one organism.

[0552] PCR is used to generate a template for in vitro transcription of mRNA which is used for transfection. Methods for performing PCR are well known in the art. Primers for use in PCR are designed to have regions that are substantially complementary to regions of the DNA to be used as a template for the PCR. “Substantially complementary,” as used herein, refers to sequences of nucleotides where a majority or all of the bases in the primer sequence are complementary, or one or more bases are non-complementary, or mismatched. Substantially complementary sequences are able to anneal or hybridize with the intended DNA target under annealing conditions used for PCR. The primers can be designed to be substantially complementary to any portion of the DNA template. For example, the primers can be designed to amplify the portion of a nucleic acid that is normally transcribed in cells (the open reading frame), including 5′ and 3′ UTRs. The primers can also be designed to amplify a portion of a nucleic acid that encodes a particular domain of interest. In one embodiment, the primers are designed to amplify the coding region of a human cDNA, including all or portions of the 5′ and 3′ UTRs. Primers useful for PCR can be generated by synthetic methods that are well known in the art. “Forward primers” are primers that contain a region of nucleotides that are substantially complementary to nucleotides on the DNA template that are upstream of the DNA sequence that is to be amplified. “Upstream” is used herein to refer to a location 5, to the DNA sequence to be amplified relative to the coding strand. “Reverse primers” are primers that contain a region of nucleotides that are substantially complementary to a double-stranded DNA template that are downstream of the DNA sequence that is to be amplified. “Downstream” is used herein to refer to a location 3′ to the DNA sequence to be amplified relative to the coding strand.

[0553] Any DNA polymerase useful for PCR can be used in the methods disclosed herein. The reagents and polymerase are commercially available from a number of sources.

[0554] Chemical structures with the ability to promote stability and/or translation efficiency may also be used. The RNA preferably has 5′ and 3′ UTRs. In one embodiment, the 5′ UTR is between one and 3000 nucleotides in length. The length of 5′ and 3′ UTR sequences to be added to the coding region can be altered by different methods, including, but not limited to, designing primers for PCR that anneal to different regions of the UTRs. Using this approach, one of ordinary skill in the art can modify the 5′ and 3′ UTR lengths required to achieve optimal translation efficiency following transfection of the transcribed RNA.

[0555] The 5′ and 3′ UTRs can be the naturally occurring, endogenous 5′ and 3′ UTRs for the nucleic acid of interest. Alternatively, UTR sequences that are not endogenous to the nucleic acid of interest can be added by incorporating the UTR sequences into the forward and reverse primers or by any other modifications of the template. The use of UTR sequences that are not endogenous to the nucleic acid of interest can be useful for modifying the stability and/or translation efficiency of the RNA. For example, it is known that AU-rich elements in 3′ UTR sequences can decrease the stability of mRNA. Therefore, 3′ UTRs can be selected or designed to increase the stability of the transcribed RNA based on properties of UTRs that are well known in the art.

[0556] In one embodiment, the 5′ UTR can contain the Kozak sequence of the endogenous nucleic acid. Alternatively, when a 5′ UTR that is not endogenous to the nucleic acid of interest is being added by PCR as described above, a consensus Kozak sequence can be redesigned by adding the 5′ UTR sequence. Kozak sequences can increase the efficiency of translation of some RNA transcripts, but does not appear to be required for all RNAs to enable efficient translation. The requirement for Kozak sequences for many mRNAs is known in the art. In other embodiments the 5′ UTR can be 5′UTR of an RNA virus whose RNA genome is stable in cells. In other embodiments various nucleotide analogues can be used in the 3′ or 5′ UTR to impede exonuclease degradation of the mRNA.

[0557] To enable synthesis of RNA from a DNA template without the need for gene cloning, a promoter of transcription should be attached to the DNA template upstream of the sequence to be transcribed. When a sequence that functions as a promoter for an RNA polymerase is added to the 5′ end of the forward primer, the RNA polymerase promoter becomes incorporated into the PCR product upstream of the open reading frame that is to be transcribed. In one preferred embodiment, the promoter is a T7 polymerase promoter, as described elsewhere herein. Other useful promoters include, but are not limited to, T3 and SP6 RNA polymerase promoters. Consensus nucleotide sequences for T7, T3 and SP6 promoters are known in the art.

[0558] In a preferred embodiment, the mRNA has both a cap on the 5′ end and a 3′ poly(A) tail which determine ribosome binding, initiation of translation and stability mRNA in the cell. On a circular DNA template, for instance, plasmid DNA, RNA polymerase produces a long concatameric product which is not suitable for expression in eukaryotic cells. The transcription of plasmid DNA linearized at the end of the 3′ UTR results in normal sized mRNA which is not effective in eukaryotic transfection even if it is polyadenylated after transcription.

[0559] On a linear DNA template, phage T7 RNA polymerase can extend the 3′ end of the transcript beyond the last base of the template (Schenborn and Mierendorf, Nuc Acids Res., 13:6223-36 (1985); Nacheva and Berzal-Herranz, Eur. J. Biochem., 270:1485-65 (2003).

[0560] The conventional method of integration of polyA/T stretches into a DNA template is molecular cloning. However polyA/T sequence integrated into plasmid DNA can cause plasmid instability, which is why plasmid DNA templates obtained from bacterial cells are often highly contaminated with deletions and other aberrations. This makes cloning procedures not only laborious and time consuming but often not reliable. That is why a method which allows construction of DNA templates with polyA/T 3′ stretch without cloning highly desirable.

[0561] The polyA/T segment of the transcriptional DNA template can be produced during PCR by using a reverse primer containing a polyT tail, such as 100T tail (SEQ ID NO: 35) (size can be 50-5000 T (SEQ ID NO: 2588)), or after PCR by any other method, including, but not limited to, DNA ligation or in vitro recombination. Poly(A) tails also provide stability to RNAs and reduce their degradation. Generally, the length of a poly(A) tail positively correlates with the stability of the transcribed RNA. In one embodiment, the poly(A) tail is between 100 and 5000 adenosines (e.g., SEQ ID NO: 34).

[0562] Poly(A) tails of RNAs can be further extended following in vitro transcription with the use of a poly(A) polymerase, such as E. coli polyA polymerase (E-PAP). In one embodiment, increasing the length of a poly(A) tail from 100 nucleotides to between 300 and 400 nucleotides (SEQ ID NO: 38) results in about a two-fold increase in the translation efficiency of the RNA. Additionally, the attachment of different chemical groups to the 3′ end can increase mRNA stability. Such attachment can contain modified/artificial nucleotides, aptamers and other compounds. For example, ATP analogs can be incorporated into the poly(A) tail using poly(A) polymerase. ATP analogs can further increase the stability of the RNA.

[0563] 5′ caps on also provide stability to RNA molecules. In a preferred embodiment, RNAs produced by the methods disclosed herein include a 5′ cap. The 5′ cap is provided using techniques known in the art and described herein (Cougot, et al., Trends in Biochem. Sci., 29:436-444 (2001); Stepinski, et al., RNA, 7:1468-95 (2001); Elango, et al., Biochim. Biophys. Res. Commun., 330:958-966 (2005)).

[0564] The RNAs produced by the methods disclosed herein can also contain an internal ribosome entry site (IRES) sequence. The IRES sequence may be any viral, chromosomal or artificially designed sequence which initiates cap-independent ribosome binding to mRNA and facilitates the initiation of translation. Any solutes suitable for cell electroporation, which can contain factors facilitating cellular permeability and viability such as sugars, peptides, lipids, proteins, antioxidants, and surfactants can be included.

[0565] RNA can be introduced into target cells using any of a number of different methods, for instance, commercially available methods which include, but are not limited to, electroporation (Amaxa Nucleofector-II (Amaxa Biosystems, Cologne, Germany)), (ECM 830 (BTX) (Harvard Instruments, Boston, Mass.) or the Gene Pulser II (BioRad, Denver, Colo.), Multiporator (Eppendort, Hamburg Germany), cationic liposome mediated transfection using lipofection, polymer encapsulation, peptide mediated transfection, or biolistic particle delivery systems such as “gene guns” (see, for example, Nishikawa, et al. Hum Gene Ther., 12(8):861-70 (2001).

[0566] Non-Viral Delivery Methods

[0567] In some aspects, non-viral methods can be used to deliver a nucleic acid encoding a CAR described herein into a cell or tissue or a subject.

[0568] In some embodiments, the non-viral method includes the use of a transposon (also called a transposable element). In some embodiments, a transposon is a piece of DNA that can insert itself at a location in a genome, for example, a piece of DNA that is capable of self-replicating and inserting its copy into a genome, or a piece of DNA that can be spliced out of a longer nucleic acid and inserted into another place in a genome. For example, a transposon comprises a DNA sequence made up of inverted repeats flanking genes for transposition.

[0569] Exemplary methods of nucleic acid delivery using a transposon include a Sleeping Beauty transposon system (SBTS) and a piggyBac (PB) transposon system. See, e.g., Aronovich et al. Hum. Mol. Genet. 20.R1(2011):R14-20; Singh et al. Cancer Res. 15(2008):2961-2971; Huang et al. Mol. Ther. 16(2008):580-589; Grabundzija et al. Mol. Ther. 18(2010):1200-1209; Kebriaei et al. Blood. 122.21(2013):166; Williams. Molecular Therapy 16.9(2008):1515-16; Bell et al. Nat. Protoc. 2.12(2007):3153-65; and Ding et al. Cell. 122.3(2005):473-83, all of which are incorporated herein by reference.

[0570] The SBTS includes two components: 1) a transposon containing a transgene and 2) a source of transposase enzyme. The transposase can transpose the transposon from a carrier plasmid (or other donor DNA) to a target DNA, such as a host cell chromosome/genome. For example, the transposase binds to the carrier plasmid/donor DNA, cuts the transposon (including transgene(s)) out of the plasmid, and inserts it into the genome of the host cell. See, e.g., Aronovich et al. supra.

[0571] Exemplary transposons include a pT2-based transposon. See, e.g., Grabundzija et al. Nucleic Acids Res. 41.3(2013):1829-47; and Singh et al. Cancer Res. 68.8(2008): 2961-2971, all of which are incorporated herein by reference. Exemplary transposases include a Tc1/mariner-type transposase, e.g., the SB10 transposase or the SB11 transposase (a hyperactive transposase which can be expressed, e.g., from a cytomegalovirus promoter). See, e.g., Aronovich et al.; Kebriaei et al.; and Grabundzija et al., all of which are incorporated herein by reference.

[0572] Use of the SBTS permits efficient integration and expression of a transgene, e.g., a nucleic acid encoding a CAR described herein. Provided herein are methods of generating a cell, e.g., T cell or NK cell, that stably expresses a CAR described herein, e.g., using a transposon system such as SBTS.

[0573] In accordance with methods described herein, in some embodiments, one or more nucleic acids, e.g., plasmids, containing the SBTS components are delivered to a cell (e.g., T or NK cell). For example, the nucleic acid(s) are delivered by standard methods of nucleic acid (e.g., plasmid DNA) delivery, e.g., methods described herein, e.g., electroporation, transfection, or lipofection. In some embodiments, the nucleic acid contains a transposon comprising a transgene, e.g., a nucleic acid encoding a CAR described herein. In some embodiments, the nucleic acid contains a transposon comprising a transgene (e.g., a nucleic acid encoding a CAR described herein) as well as a nucleic acid sequence encoding a transposase enzyme. In other embodiments, a system with two nucleic acids is provided, e.g., a dual-plasmid system, e.g., where a first plasmid contains a transposon comprising a transgene, and a second plasmid contains a nucleic acid sequence encoding a transposase enzyme. For example, the first and the second nucleic acids are co-delivered into a host cell.

[0574] In some embodiments, cells, e.g., T or NK cells, are generated that express a CAR described herein by using a combination of gene insertion using the SBTS and genetic editing using a nuclease (e.g., Zinc finger nucleases (ZFNs), Transcription Activator-Like Effector Nucleases (TALENs), the CRISPR/Cas system, or engineered meganuclease re-engineered homing endonucleases).

[0575] In some embodiments, use of a non-viral method of delivery permits reprogramming of cells, e.g., T or NK cells, and direct infusion of the cells into a subject. Advantages of non-viral vectors include but are not limited to the ease and relatively low cost of producing sufficient amounts required to meet a patient population, stability during storage, and lack of immunogenicity.

[0576] Sources of Cells

[0577] Prior to expansion and genetic modification, e.g., to express a CAR described herein, a source of cells, e.g., T cell or NK cells, can be obtained from a subject. The term “subject” is intended to include living organisms in which an immune response can be elicited (e.g., mammals). Examples of subjects include humans, dogs, cats, mice, rats, and transgenic species thereof. T cells can be obtained from a number of sources, including peripheral blood mononuclear cells, bone marrow, lymph node tissue, cord blood, thymus tissue, tissue from a site of infection, ascites, pleural effusion, spleen tissue, and tumors. In certain aspects of the present disclosure, any number of T cell lines available in the art, may be used. In certain aspects of the present disclosure, T cells can be obtained from a unit of blood collected from a subject using any number of techniques known to the skilled artisan, such as Ficoll™ separation. In one preferred aspect, cells from the circulating blood of an individual are obtained by apheresis. The apheresis product typically contains lymphocytes, including T cells, monocytes, granulocytes, B cells, other nucleated white blood cells, red blood cells, and platelets. In one aspect, the cells collected by apheresis may be washed to remove the plasma fraction and to place the cells in an appropriate buffer or media for subsequent processing steps. In one aspect of the invention, the cells are washed with phosphate buffered saline (PBS). In an alternative aspect, the wash solution lacks calcium and may lack magnesium or may lack many if not all divalent cations. Initial activation steps in the absence of calcium can lead to magnified activation. As those of ordinary skill in the art would readily appreciate a washing step may be accomplished by methods known to those in the art, such as by using a semi-automated “flow-through” centrifuge (for example, the Cobe 2991 cell processor, the Baxter CytoMate, or the Haemonetics Cell Saver 5) according to the manufacturer's instructions. After washing, the cells may be resuspended in a variety of biocompatible buffers, such as, for example, Ca-free, Mg-free PBS, PlasmaLyte A, or other saline solution with or without buffer. Alternatively, the undesirable components of the apheresis sample may be removed and the cells directly resuspended in culture media.

[0578] It is recognized that the methods of the application can utilize culture media conditions comprising 5% or less, for example 2%, human AB serum, and employ known culture media conditions and compositions, for example those described in Smith et al., “Ex vivo expansion of human T cells for adoptive immunotherapy using the novel Xeno-free CTS Immune Cell Serum Replacement” Clinical & Translational Immunology (2015) 4, e31; doi:10.1038/cti.2014.31.

[0579] In one aspect, T cells are isolated from peripheral blood lymphocytes by lysing the red blood cells and depleting the monocytes, for example, by centrifugation through a PERCOLL™ gradient or by counterflow centrifugal elutriation. A specific subpopulation of T cells, such as CD3+, CD28+, CD4+, CD8+, CD45RA+, and CD45RO+ T cells, can be further isolated by positive or negative selection techniques. For example, in one aspect, T cells are isolated by incubation with anti-CD3/anti-CD28 (e.g., 3×28)-conjugated beads, such as DYNABEADS® M-450 CD3/CD28 T, for a time period sufficient for positive selection of the desired T cells. In one aspect, the time period is about 30 minutes. In a further aspect, the time period ranges from 30 minutes to 36 hours or longer and all integer values there between. In a further aspect, the time period is at least 1, 2, 3, 4, 5, or 6 hours. In yet another preferred aspect, the time period is 10 to 24 hours. In one aspect, the incubation time period is 24 hours. Longer incubation times may be used to isolate T cells in any situation where there are few T cells as compared to other cell types, such in isolating tumor infiltrating lymphocytes (TIL) from tumor tissue or from immunocompromised individuals. Further, use of longer incubation times can increase the efficiency of capture of CD8+ T cells. Thus, by simply shortening or lengthening the time T cells are allowed to bind to the CD3/CD28 beads and/or by increasing or decreasing the ratio of beads to T cells (as described further herein), subpopulations of T cells can be preferentially selected for or against at culture initiation or at other time points during the process. Additionally, by increasing or decreasing the ratio of anti-CD3 and/or anti-CD28 antibodies on the beads or other surface, subpopulations of T cells can be preferentially selected for or against at culture initiation or at other desired time points. The skilled artisan would recognize that multiple rounds of selection can also be used in the context of this invention. In certain aspects, it may be desirable to perform the selection procedure and use the “unselected” cells in the activation and expansion process. “Unselected” cells can also be subjected to further rounds of selection.

[0580] Enrichment of a T cell population by negative selection can be accomplished with a combination of antibodies directed to surface markers unique to the negatively selected cells. One method is cell sorting and/or selection via negative magnetic immunoadherence or flow cytometry that uses a cocktail of monoclonal antibodies directed to cell surface markers present on the cells negatively selected. For example, to enrich for CD4+ cells by negative selection, a monoclonal antibody cocktail typically includes antibodies to CD14, CD20, CD11b, CD16, HLA-DR, and CD8. In certain aspects, it may be desirable to enrich for or positively select for regulatory T cells which typically express CD4+, CD25+, CD62Lhi, GITR+, and FoxP3+. Alternatively, in certain aspects, T regulatory cells are depleted by anti-C25 conjugated beads or other similar method of selection.

[0581] The methods described herein can include, e.g., selection of a specific subpopulation of immune effector cells, e.g., T cells, that are a T regulatory cell-depleted population, CD25+ depleted cells, using, e.g., a negative selection technique, e.g., described herein. Preferably, the population of T regulatory depleted cells contains less than 30%, 25%, 20%, 15%, 10%, 5%, 4%, 3%, 2%, 1% of CD25+ cells.

[0582] In one embodiment, T regulatory cells, e.g., CD25+ T cells, are removed from the population using an anti-CD25 antibody, or fragment thereof, or a CD25-binding ligand, IL-2. In one embodiment, the anti-CD25 antibody, or fragment thereof, or CD25-binding ligand is conjugated to a substrate, e.g., a bead, or is otherwise coated on a substrate, e.g., a bead. In one embodiment, the anti-CD25 antibody, or fragment thereof, is conjugated to a substrate as described herein.

[0583] In one embodiment, the T regulatory cells, e.g., CD25+ T cells, are removed from the population using CD25 depletion reagent from Miltenyi™. In one embodiment, the ratio of cells to CD25 depletion reagent is 1e7 cells to 20 uL, or 1e7 cells to 15 uL, or 1e7 cells to 10 uL, or 1e7 cells to 5 uL, or 1e7 cells to 2.5 uL, or 1e7 cells to 1.25 uL. In one embodiment, e.g., for T regulatory cells, e.g., CD25+ depletion, greater than 500 million cells/ml is used. In a further aspect, a concentration of cells of 600, 700, 800, or 900 million cells/ml is used.

[0584] In one embodiment, the population of immune effector cells to be depleted includes about 6×10⁹ CD25+ T cells. In other aspects, the population of immune effector cells to be depleted include about 1×10⁹ to 1×10¹⁰ CD25+ T cell, and any integer value in between. In one embodiment, the resulting population T regulatory depleted cells has 2×10⁹ T regulatory cells, e.g., CD25+ cells, or less (e.g., 1×10⁹, 5×10⁸, 1×10⁸, 5×10⁷, 1×10⁷, or less CD25+ cells).

[0585] In one embodiment, the T regulatory cells, e.g., CD25+ cells, are removed from the population using the CliniMAC system with a depletion tubing set, such as, e.g., tubing 162-01. In one embodiment, the CliniMAC system is run on a depletion setting such as, e.g., DEPLETION2.1.

[0586] Without wishing to be bound by a particular theory, decreasing the level of negative regulators of immune cells (e.g., decreasing the number of unwanted immune cells, e.g., T_{REG} cells), in a subject prior to apheresis or during manufacturing of a CAR-expressing cell product can reduce the risk of subject relapse. For example, methods of depleting T_{REG} cells are known in the art. Methods of decreasing T_{REG} cells include, but are not limited to, cyclophosphamide, anti-GITR antibody (an anti-GITR antibody described herein), CD25-depletion, and combinations thereof.

[0587] In some embodiments, the manufacturing methods comprise reducing the number of (e.g., depleting) T_{REG} cells prior to manufacturing of the CAR-expressing cell. For example, manufacturing methods comprise contacting the sample, e.g., the apheresis sample, with an anti-GITR antibody and/or an anti-CD25 antibody (or fragment thereof, or a CD25-binding ligand), e.g., to deplete T_{REG} cells prior to manufacturing of the CAR-expressing cell (e.g., T cell, NK cell) product.

[0588] In an embodiment, a subject is pre-treated with one or more therapies that reduce T_{REG} cells prior to collection of cells for CAR-expressing cell product manufacturing, thereby reducing the risk of subject relapse to CAR-expressing cell treatment. In an embodiment, methods of decreasing T_{REG} cells include, but are not limited to, administration to the subject of one or more of cyclophosphamide, anti-GITR antibody, CD25-depletion, or a combination thereof. Administration of one or more of cyclophosphamide, anti-GITR antibody, CD25-depletion, or a combination thereof, can occur before, during or after an infusion of the CAR-expressing cell product.

[0589] In an embodiment, a subject is pre-treated with cyclophosphamide prior to collection of cells for CAR-expressing cell product manufacturing, thereby reducing the risk of subject relapse to CAR-expressing cell treatment. In an embodiment, a subject is pre-treated with an anti-GITR antibody prior to collection of cells for CAR-expressing cell product manufacturing, thereby reducing the risk of subject relapse to CAR-expressing cell treatment.

[0590] In one embodiment, the population of cells to be removed are neither the regulatory T cells or tumor cells, but cells that otherwise negatively affect the expansion and/or function of CART cells, e.g. cells expressing CD14, CD11b, CD33, CD15, or other markers expressed by potentially immune suppressive cells. In one embodiment, such cells are envisioned to be removed concurrently with regulatory T cells and/or tumor cells, or following said depletion, or in another order.

[0591] The methods described herein can include more than one selection step, e.g., more than one depletion step. Enrichment of a T cell population by negative selection can be accomplished, e.g., with a combination of antibodies directed to surface markers unique to the negatively selected cells. One method is cell sorting and/or selection via negative magnetic immunoadherence or flow cytometry that uses a cocktail of monoclonal antibodies directed to cell surface markers present on the cells negatively selected. For example, to enrich for CD4+ cells by negative selection, a monoclonal antibody cocktail can include antibodies to CD14, CD20, CD11b, CD16, HLA-DR, and CD8.

[0592] The methods described herein can further include removing cells from the population which express a tumor antigen, e.g., a tumor antigen that does not comprise CD25, e.g., CD19, CD30, CD38, CD123, CD20, CD14 or CD11b, to thereby provide a population of T regulatory depleted, e.g., CD25+ depleted, and tumor antigen depleted cells that are suitable for expression of a CAR, e.g., a CAR described herein. In one embodiment, tumor antigen expressing cells are removed simultaneously with the T regulatory, e.g., CD25+ cells. For example, an anti-CD25 antibody, or fragment thereof, and an anti-tumor antigen antibody, or fragment thereof, can be attached to the same substrate, e.g., bead, which can be used to remove the cells or an anti-CD25 antibody, or fragment thereof, or the anti-tumor antigen antibody, or fragment thereof, can be attached to separate beads, a mixture of which can be used to remove the cells. In other embodiments, the removal of T regulatory cells, e.g., CD25+ cells, and the removal of the tumor antigen expressing cells is sequential, and can occur, e.g., in either order.

[0593] Also provided are methods that include removing cells from the population which express a check point inhibitor, e.g., a check point inhibitor described herein, e.g., one or more of PD1+ cells, LAG3+ cells, and TIM3+ cells, to thereby provide a population of T regulatory depleted, e.g., CD25+ depleted cells, and check point inhibitor depleted cells, e.g., PD1+, LAG3+ and/or TIM3+ depleted cells. Exemplary check point inhibitors include B7-H1, B7-1, CD160, P1H, 2B4, PD1, TIM3, CEACAM (e.g., CEACAM-1, CEACAM-3 and/or CEACAM-5), LAG3, TIGIT, CTLA-4, BTLA and LAIR1. In one embodiment, check point inhibitor expressing cells are removed simultaneously with the T regulatory, e.g., CD25+ cells. For example, an anti-CD25 antibody, or fragment thereof, and an anti-check point inhibitor antibody, or fragment thereof, can be attached to the same bead which can be used to remove the cells, or an anti-CD25 antibody, or fragment thereof, and the anti-check point inhibitor antibody, or fragment there, can be attached to separate beads, a mixture of which can be used to remove the cells. In other embodiments, the removal of T regulatory cells, e.g., CD25+ cells, and the removal of the check point inhibitor expressing cells is sequential, and can occur, e.g., in either order.

[0594] In one embodiment, a T cell population can be selected that expresses one or more of IFN-^{γ}, TNFα, IL-17A, IL-2, IL-3, IL-4, GM-CSF, IL-10, IL-13, granzyme B, and perforin, or other appropriate molecules, e.g., other cytokines. Methods for screening for cell expression can be determined, e.g., by the methods described in PCT Publication No.: WO 2013/126712.

[0595] For isolation of a desired population of cells by positive or negative selection, the concentration of cells and surface (e.g., particles such as beads) can be varied. In certain aspects, it may be desirable to significantly decrease the volume in which beads and cells are mixed together (e.g., increase the concentration of cells), to ensure maximum contact of cells and beads. For example, in one aspect, a concentration of 2 billion cells/ml is used. In one aspect, a concentration of 1 billion cells/ml is used. In a further aspect, greater than 100 million cells/ml is used. In a further aspect, a concentration of cells of 10, 15, 20, 25, 30, 35, 40, 45, or 50 million cells/ml is used. In yet one aspect, a concentration of cells from 75, 80, 85, 90, 95, or 100 million cells/ml is used. In further aspects, concentrations of 125 or 150 million cells/ml can be used. Using high concentrations can result in increased cell yield, cell activation, and cell expansion. Further, use of high cell concentrations allows more efficient capture of cells that may weakly express target antigens of interest, such as CD28-negative T cells, or from samples where there are many tumor cells present (e.g., leukemic blood, tumor tissue, etc.). Such populations of cells may have therapeutic value and would be desirable to obtain. For example, using high concentration of cells allows more efficient selection of CD8+ T cells that normally have weaker CD28 expression.

[0596] In a related aspect, it may be desirable to use lower concentrations of cells. By significantly diluting the mixture of T cells and surface (e.g., particles such as beads), interactions between the particles and cells is minimized. This selects for cells that express high amounts of desired antigens to be bound to the particles. For example, CD4+ T cells express higher levels of CD28 and are more efficiently captured than CD8+ T cells in dilute concentrations. In one aspect, the concentration of cells used is 5×10⁶/ml. In other aspects, the concentration used can be from about 1×10⁵/ml to 1×10⁶/ml, and any integer value in between.

[0597] In other aspects, the cells may be incubated on a rotator for varying lengths of time at varying speeds at either 2-10° C. or at room temperature.

[0598] T cells for stimulation can also be frozen after a washing step. Wishing not to be bound by theory, the freeze and subsequent thaw step provides a more uniform product by removing granulocytes and to some extent monocytes in the cell population. After the washing step that removes plasma and platelets, the cells may be suspended in a freezing solution. While many freezing solutions and parameters are known in the art and will be useful in this context, one method involves using PBS containing 20% DMSO and 8% human serum albumin, or culture media containing 10% Dextran 40 and 5% Dextrose, 20% Human Serum Albumin and 7.5% DMSO, or 31.25% Plasmalyte-A, 31.25% Dextrose 5%, 0.45% NaCl, 10% Dextran 40 and 5% Dextrose, 20% Human Serum Albumin, and 7.5% DMSO or other suitable cell freezing media containing for example, Hespan and PlasmaLyte A, the cells then are frozen to −80° C. at a rate of 1° per minute and stored in the vapor phase of a liquid nitrogen storage tank. Other methods of controlled freezing may be used as well as uncontrolled freezing immediately at −20° C. or in liquid nitrogen.

[0599] In certain aspects, cryopreserved cells are thawed and washed as described herein and allowed to rest for one hour at room temperature prior to activation using the methods of the present disclosure.

[0600] Also contemplated in the context of the invention is the collection of blood samples or apheresis product from a subject at a time period prior to when the expanded cells as described herein might be needed. As such, the source of the cells to be expanded can be collected at any time point necessary, and desired cells, such as T cells, isolated and frozen for later use in T cell therapy for any number of diseases or conditions that would benefit from T cell therapy, such as those described herein. In one aspect a blood sample or an apheresis is taken from a generally healthy subject. In certain aspects, a blood sample or an apheresis is taken from a generally healthy subject who is at risk of developing a disease, but who has not yet developed a disease, and the cells of interest are isolated and frozen for later use. In certain aspects, the T cells may be expanded, frozen, and used at a later time. In certain aspects, samples are collected from a patient shortly after diagnosis of a particular disease as described herein but prior to any treatments. In a further aspect, the cells are isolated from a blood sample or an apheresis from a subject prior to any number of relevant treatment modalities, including but not limited to treatment with agents such as natalizumab, efalizumab, antiviral agents, chemotherapy, radiation, immunosuppressive agents, such as cyclosporin, azathioprine, methotrexate, mycophenolate, and FK506, antibodies, or other immunoablative agents such as CAMPATH, anti-CD3 antibodies, cytoxan, fludarabine, cyclosporin, FK506, rapamycin, mycophenolic acid, steroids, FR901228, and irradiation.

[0601] In a further aspect of the present disclosure, T cells are obtained from a patient directly following treatment that leaves the subject with functional T cells. In this regard, it has been observed that following certain cancer treatments, in particular treatments with drugs that damage the immune system, shortly after treatment during the period when patients would normally be recovering from the treatment, the quality of T cells obtained may be optimal or improved for their ability to expand ex vivo. Likewise, following ex vivo manipulation using the methods described herein, these cells may be in a preferred state for enhanced engraftment and in vivo expansion. Thus, it is contemplated within the context of the present disclosure to collect blood cells, including T cells, dendritic cells, or other cells of the hematopoietic lineage, during this recovery phase. Further, in certain aspects, mobilization (for example, mobilization with GM-CSF) and conditioning regimens can be used to create a condition in a subject wherein repopulation, recirculation, regeneration, and/or expansion of particular cell types is favored, especially during a defined window of time following therapy. Illustrative cell types include T cells, B cells, dendritic cells, and other cells of the immune system.

[0602] In one embodiment, a T cell population is diaglycerol kinase (DGK)-deficient. DGK-deficient cells include cells that do not express DGK RNA or protein, or have reduced or inhibited DGK activity. DGK-deficient cells can be generated by genetic approaches, e.g., administering RNA-interfering agents, e.g., siRNA, shRNA, miRNA, to reduce or prevent DGK expression. Alternatively, DGK-deficient cells can be generated by treatment with DGK inhibitors described herein.

[0603] In one embodiment, a T cell population is Ikaros-deficient. Ikaros-deficient cells include cells that do not express Ikaros RNA or protein, or have reduced or inhibited Ikaros activity, Ikaros-deficient cells can be generated by genetic approaches, e.g., administering RNA-interfering agents, e.g., siRNA, shRNA, miRNA, to reduce or prevent Ikaros expression. Alternatively, Ikaros-deficient cells can be generated by treatment with Ikaros inhibitors, e.g., lenalidomide.

[0604] In embodiments, a T cell population is DGK-deficient and Ikaros-deficient, e.g., does not express DGK and Ikaros, or has reduced or inhibited DGK and Ikaros activity. Such DGK and Ikaros-deficient cells can be generated by any of the methods described herein.

[0605] In an embodiment, the NK cells are obtained from the subject. In another embodiment, the NK cells are an NK cell line, e.g., NK-92 cell line (Conkwest).

[0606] Allogeneic CAR Immune Effector Cells

[0607] In embodiments described herein, the immune effector cell can be an allogeneic immune effector cell, e.g., T cell or NK cell. For example, the cell can be an allogeneic T cell, e.g., an allogeneic T cell lacking expression of a functional T cell receptor (TCR) and/or human leukocyte antigen (HLA), e.g., HLA class I and/or HLA class II.

[0608] A T cell lacking a functional TCR can be, e.g., engineered such that it does not express any functional TCR on its surface, engineered such that it does not express one or more subunits that comprise a functional TCR or engineered such that it produces very little functional TCR on its surface. Alternatively, the T cell can express a substantially impaired TCR, e.g., by expression of mutated or truncated forms of one or more of the subunits of the TCR. The term “substantially impaired TCR” means that this TCR will not elicit an adverse immune reaction in a host.

[0609] A T cell described herein can be, e.g., engineered such that it does not express a functional HLA on its surface. For example, a T cell described herein, can be engineered such that cell surface expression HLA, e.g., HLA class I and/or HLA class II, is downregulated.

[0610] In some embodiments, the T cell can lack a functional TCR and a functional HLA, e.g., HLA class I and/or HLA class II.

[0611] Modified T cells that lack expression of a functional TCR and/or HLA can be obtained by any suitable means, including a knock out or knock down of one or more subunit of TCR or HLA. For example, the T cell can include a knock down of TCR and/or HLA using siRNA, shRNA, clustered regularly interspaced short palindromic repeats (CRISPR) transcription-activator like effector nuclease (TALEN), or zinc finger endonuclease (ZFN).

[0612] In some embodiments, the allogeneic cell can be a cell which does not expresses or expresses at low levels an inhibitory molecule, e.g. by any mehod described herein. For example, the cell can be a cell that does not express or expresses at low levels an inhibitory molecule, e.g., that can decrease the ability of a CAR-expressing cell to mount an immune effector response. Examples of inhibitory molecules include PD1, PD-L1, CTLA4, TIM3, LAG3, VISTA, BTLA, TIGIT, LAIR1, CD160, 2B4, CD80, CD86, B7-H3 (CD276), B7-H4 (VTCN1), HVEM (TNFRSF14 or CD270), KIR, A2aR, MHC class I, MHC class II, GAL9, adenosine, and TGF beta. Inhibition of an inhibitory molecule, e.g., by inhibition at the DNA, RNA or protein level, can optimize a CAR-expressing cell performance. In embodiments, an inhibitory nucleic acid, e.g., an inhibitory nucleic acid, e.g., a dsRNA, e.g., an siRNA or shRNA, a clustered regularly interspaced short palindromic repeats (CRISPR), a transcription-activator like effector nuclease (TALEN), or a zinc finger endonuclease (ZFN), e.g., as described herein, can be used.

[0613] siRNA and shRNA to Inhibit TCR or HLA

[0614] In some embodiments, TCR expression and/or HLA expression can be inhibited using siRNA or shRNA that targets a nucleic acid encoding a TCR and/or HLA, and/or an inhibitory molecule described herein (e.g., PD1, PD-L1, PD-L2, CTLA4, TIM3, CEACAM (e.g., CEACAM-1, CEACAM-3 and/or CEACAM-5), LAG3, VISTA, BTLA, TIGIT, LAIR1, CD160, 2B4, CD80, CD86, B7-H3 (CD276), B7-H4 (VTCN1), HVEM (TNFRSF14 or CD270), KIR, A2aR, MHC class I, MHC class II, GAL9, adenosine, and TGF beta), in a cell, e.g., T cell.

[0615] Expression systems for siRNA and shRNAs, and exemplary shRNAs, are described, e.g., in paragraphs 649 and 650 of International Publication WO2015/142675, filed Mar. 13, 2015, which is incorporated by reference in its entirety.

[0616] CRISPR to Inhibit TCR or HLA

[0617] “CRISPR” or “CRISPR to TCR and/or HLA” or “CRISPR to inhibit TCR and/or HLA” as used herein refers to a set of clustered regularly interspaced short palindromic repeats, or a system comprising such a set of repeats. “Cas”, as used herein, refers to a CRISPR-associated protein.

[0618] A “CRISPR/Cas” system refers to a system derived from CRISPR and Cas which can be used to silence or mutate a TCR and/or HLA gene, and/or an inhibitory molecule described herein (e.g., PD1, PD-L1, PD-L2, CTLA4, TIM3, CEACAM (e.g., CEACAM-1, CEACAM-3 and/or CEACAM-5), LAG3, VISTA, BTLA, TIGIT, LAIR1, CD160, 2B4, CD80, CD86, B7-H3 (CD276), B7-H4 (VTCN1), HVEM (TNFRSF14 or CD270), KIR, A2aR, MHC class I, MHC class II, GAL9, adenosine, and TGF beta), in a cell, e.g., T cell.

[0619] The CRISPR/Cas system, and uses thereof, are described, e.g., in paragraphs 651-658 of International Publication WO2015/142675, filed Mar. 13, 2015, which is incorporated by reference in its entirety.

[0620] TALEN to Inhibit TCR and/or HLA

[0621] TALEN″ or “TALEN to HLA and/or TCR” or “TALEN to inhibit HLA and/or TCR” refers to a transcription activator-like effector nuclease, an artificial nuclease which can be used to edit the HLA and/or TCR gene, and/or an inhibitory molecule described herein (e.g., PD1, PD-L1, PD-L2, CTLA4, TIM3, CEACAM (e.g., CEACAM-1, CEACAM-3 and/or CEACAM-5), LAG3, VISTA, BTLA, TIGIT, LAIR1, CD160, 2B4, CD80, CD86, B7-H3 (CD276), B7-H4 (VTCN1), HVEM (TNFRSF14 or CD270), KIR, A2aR, MHC class I, MHC class II, GAL9, adenosine, and TGF beta), in a cell, e.g., T cell.

[0622] TALENs, and uses thereof, are described, e.g., in paragraphs 659-665 of International Publication WO2015/142675, filed Mar. 13, 2015, which is incorporated by reference in its entirety.

[0623] Zinc finger nuclease to inhibit HLA and/or TCR

[0624] “ZFN” or “Zinc Finger Nuclease” or “ZFN to HLA and/or TCR” or “ZFN to inhibit HLA and/or TCR” refer to a zinc finger nuclease, an artificial nuclease which can be used to edit the HLA and/or TCR gene, and/or an inhibitory molecule described herein (e.g., PD1, PD-L1, PD-L2, CTLA4, TIM3, CEACAM (e.g., CEACAM-1, CEACAM-3 and/or CEACAM-5), LAG3, VISTA, BTLA, TIGIT, LAIR1, CD160, 2B4, CD80, CD86, B7-H3 (CD276), B7-H4 (VTCN1), HVEM (TNFRSF14 or CD270), KIR, A2aR, MHC class I, MHC class II, GAL9, adenosine, and TGF beta), in a cell, e.g., T cell.

[0625] ZFNs, and uses thereof, are described, e.g., in paragraphs 666-671 of International Publication WO2015/142675, filed Mar. 13, 2015, which is incorporated by reference in its entirety.

[0626] Telomerase Expression

[0627] While not wishing to be bound by any particular theory, in some embodiments, a therapeutic T cell has short term persistence in a patient, due to shortened telomeres in the T cell; accordingly, transfection with a telomerase gene can lengthen the telomeres of the T cell and improve persistence of the T cell in the patient. See Carl June, “Adoptive T cell therapy for cancer in the clinic”, Journal of Clinical Investigation, 117:1466-1476 (2007). Thus, in an embodiment, an immune effector cell, e.g., a T cell, ectopically expresses a telomerase subunit, e.g., the catalytic subunit of telomerase, e.g., TERT, e.g., hTERT. In some aspects, this disclosure provides a method of producing a CAR-expressing cell, comprising contacting a cell with a nucleic acid encoding a telomerase subunit, e.g., the catalytic subunit of telomerase, e.g., TERT, e.g., hTERT. The cell may be contacted with the nucleic acid before, simultaneous with, or after being contacted with a construct encoding a CAR.

[0628] In one aspect, the disclosure features a method of making a population of immune effector cells (e.g., T cells, NK cells). In an embodiment, the method comprises: providing a population of immune effector cells (e.g., T cells or NK cells), contacting the population of immune effector cells with a nucleic acid encoding a CAR; and contacting the population of immune effector cells with a nucleic acid encoding a telomerase subunit, e.g., hTERT, under conditions that allow for CAR and telomerase expression.

[0629] In an embodiment, the nucleic acid encoding the telomerase subunit is DNA. In an embodiment, the nucleic acid encoding the telomerase subunit comprises a promoter capable of driving expression of the telomerase subunit.

[0630] In an embodiment, hTERT has the amino acid sequence of GenBank Protein ID AAC51724.1 (Meyerson et al., “hEST2, the Putative Human Telomerase Catalytic Subunit Gene, Is Up-Regulated in Tumor Cells and during Immortalization” Cell Volume 90, Issue 4, 22 Aug. 1997, Pages 785-795) as follows:

(SEQ ID NO: 110)

[sequence omitted]

[0631] In an embodiment, the hTERT has a sequence at least 80%, 85%, 90%, 95%, 96̂, 97%, 98%, or 99% identical to the sequence of SEQ ID NO: 110. In an embodiment, the hTERT has a sequence of SEQ ID NO: 110. In an embodiment, the hTERT comprises a deletion (e.g., of no more than 5, 10, 15, 20, or 30 amino acids) at the N-terminus, the C-terminus, or both. In an embodiment, the hTERT comprises a transgenic amino acid sequence (e.g., of no more than 5, 10, 15, 20, or 30 amino acids) at the N-terminus, the C-terminus, or both.

[0632] In an embodiment, the hTERT is encoded by the nucleic acid sequence of GenBank Accession No. AF018167 (Meyerson et al., “hEST2, the Putative Human Telomerase Catalytic Subunit Gene, Is Up-Regulated in Tumor Cells and during Immortalization” Cell Volume 90, Issue 4, 22 Aug. 1997, Pages 785-795) as follows:

| (SEQ ID NO: 111) | |
|---|---|
| 1 | caggcagcgt ggtcctgctg cgcacgtggg aagccctggc cccggccacc cccgcgatgc |
| 61 | cgcgcgctcc ccgctgccga gccgtgcgct ccctgctgcg cagccactac cgcgaggtgc |
| 121 | tgccgctggc cacgttcgtg cggcgcctgg ggccccaggg ctggcggctg gtgcagcgcg |
| 181 | gggacccggc ggctttccgc gcgctggtgg cccagtgcct ggtgtgcgtg ccctgggacg |
| 241 | cacggccgcc ccccgccgcc ccctccttcc gccaggtgtc ctgcctgaag gagctggtgg |
| 301 | cccgagtgct gcagaggctg tgcgagcgcg gcgcgaagaa cgtgctggcc ttcggcttcg |
| 361 | cgctgctgga cggggcccgc gggggccccc ccgaggcctt caccaccagc gtgcgcagct |
| 421 | acctgcccaa cacggtgacc gacgcactgc gggggagcgg ggcgtggggg ctgctgttgc |
| 481 | gccgcgtggg cgacgacgtg ctggttcacc tgctggcacg ctgcgcgctc tttgtgctgg |
| 541 | tggctcccag ctgcgcctac caggtgtgcg ggccgccgct gtaccagctc ggcgctgcca |
| 601 | ctcaggcccg gcccccgcca cacgctagtg gaccccgaag gcgtctggga tgcgaacggg |
| 661 | cctggaacca tagcgtcagg gaggccgggg tccccctggg cctgccagcc ccgggtgcga |
| 721 | ggaggcgcgg gggcagtgcc agccgaagtc tgccgttgcc caagaggccc aggcgtggcg |
| 781 | ctgcccctga gccggagcgg acgcccgttg ggcaggggtc ctgggcccac ccgggcagga |
| 841 | cgcgtggacc gagtgaccgt ggtttctgtg tggtgtcacc tgccagaccc gccgaagaag |
| 901 | ccacctcttt ggagggtgcg ctctctggca cgcgccactc ccacccatcc gtgggccgcc |
| 961 | agcaccacgc gggcccccca tccacatcgc ggccaccacg tccctgggac acgccttgtc |
| 1021 | ccccggtgta cgccgagacc aagcacttcc tctactcctc aggcgacaag gagcagctgc |
| 1081 | ggccctcctt cctactcagc tctctgaggc ccagcctgac tggcgctcgg aggctcgtgg |
| 1141 | agaccatctt tctgggttcc aggccctgga tgccagggac tccccgcagg ttgccccgcc |
| 1201 | tgccccagcg ctactggcaa atgcggcccc tgtttctgga gctgcttggg aaccacgcgc |
| 1261 | agtgccccta cggggtgctc ctcaagacgc actgcccgct gcgagctgcg gtcaccccag |
| 1321 | cagccggtgt ctgtgcccgg gagaagcccc agggctctgt ggcggccccc gaggaggagg |
| 1381 | acacagaccc ccgtcgcctg gtgcagctgc tccgccagca cagcagcccc tggcaggtgt |
| 1441 | acggcttcgt gcgggcctgc ctgcgccggc tggtgccccc aggcctctgg ggctccaggc |
| 1501 | acaacgaacg ccgcttcctc aggaacacca agaagttcat ctccctgggg aagcatgcca |
| 1561 | agctctcgct gcaggagctg acgtggaaga tgagcgtgcg gggctgcgct tggctgcgca |
| 1621 | ggagcccagg ggttggctgt gttccggccg cagagcaccg tctgcgtgag gagatcctgg |
| 1681 | ccaagttcct gcactggctg atgagtgtgt acgtcgtcga gctgctcagg tctttctttt |
| 1741 | atgtcacgga gaccacgttt caaaagaaca ggctcttttt ctaccggaag agtgtctgga |
| 1801 | gcaagttgca aagcattgga atcagacagc acttgaagag ggtgcagctg cgggagctgt |
| 1861 | cggaagcaga ggtcaggcag catcgggaag ccaggcccgc cctgctgacg tccagactcc |
| 1921 | gcttcatccc caagcctgac gggctgcggc cgattgtgaa catggactac gtcgtgggag |
| 1981 | ccagaacgtt ccgcagagaa aagagggccg agcgtctcac ctcgagggtg aaggcactgt |
| 2041 | tcagcgtgct caactacgag cgggcgcggc gccccggcct cctgggcgcc tctgtgctgg |
| 2101 | gcctggacga tatccacagg gcctggcgca ccttcgtgct gcgtgtgcgg gcccaggacc |
| 2161 | cgccgcctga gctgtacttt gtcaaggtgg atgtgacggg cgcgtacgac accatccccc |
| 2221 | aggacaggct cacggaggtc atcgccagca tcatcaaacc ccagaacacg tactgcgtgc |
| 2281 | gtcggtatgc cgtggtccag aaggccgccc atgggcacgt ccgcaaggcc ttcaagagcc |
| 2341 | acgtctctac cttgacagac ctccagccgt acatgcgaca gttcgtggct cacctgcagg |
| 2401 | agaccagccc gctgagggat gccgtcgtca tcgagcagag ctcctccctg aatgaggcca |
| 2461 | gcagtggcct cttcgacgtc ttcctacgct tcatgtgcca ccacgccgtg cgcatcaggg |
| 2521 | gcaagtccta cgtccagtgc caggggatcc cgcagggctc catcctctcc acgctgctct |
| 2581 | gcagcctgtg ctacggcgac atggagaaca agctgtttgc ggggattcgg cgggacgggc |
| 2641 | tgctcctgcg tttggtggat gatttcttgt tggtgacacc tcacctcacc cacgcgaaaa |
| 2701 | ccttcctcag gaccctggtc cgaggtgtcc ctgagtatgg ctgcgtggtg aacttgcgga |
| 2761 | agacagtggt gaacttccct gtagaagacg aggccctggg tggcacggct tttgttcaga |
| 2821 | tgccggccca cggcctattc ccctggtgcg gcctgctgct ggatacccgg accctggagg |
| 2881 | tgcagagcga ctactccagc tatgcccgga cctccatcag agccagtctc accttcaacc |
| 2941 | gcggcttcaa ggctgggagg aacatgcgtc gcaaactctt tggggtcttg cggctgaagt |
| 3001 | gtcacagcct gtttctggat ttgcaggtga acagcctcca gacggtgtgc accaacatct |
| 3061 | acaagatcct cctgctgcag gcgtacaggt ttcacgcatg tgtgctgcag ctcccatttc |
| 3121 | atcagcaagt ttggaagaac cccacatttt tcctgcgcgt catctctgac acggcctccc |
| 3181 | tctgctactc catcctgaaa gccaagaacg cagggatgtc gctgggggcc aagggcgccg |
| 3241 | ccggccctct gccctccgag gccgtgcagt ggctgtgcca ccaagcattc ctgctcaagc |
| 3301 | tgactcgaca ccgtgtcacc tacgtgccac tcctggggtc actcaggaca gcccagacgc |
| 3361 | agctgagtcg gaagctcccg gggacgacgc tgactgccct ggaggccgca gccaacccgg |
| 3421 | cactgccctc agacttcaag accatcctgg actgatggcc acccgcccac agccaggccg |
| 3481 | agagcagaca ccagcagccc tgtcacgccg ggctctacgt cccagggagg gaggggcggc |
| 3541 | ccacacccag gcccgcaccg ctgggagtct gaggcctgag tgagtgtttg gccgaggcct |
| 3601 | gcatgtccgg ctgaaggctg agtgtccggc tgaggcctga gcgagtgtcc agccaagggc |
| 3661 | tgagtgtcca gcacacctgc cgtcttcact tccccacagg ctggcgctcg gctccacccc |
| 3721 | agggccagct tttcctcacc aggagcccgg cttccactcc ccacatagga atagtccatc |
| 3781 | cccagattcg ccattgttca cccctcgccc tgccctcctt tgccttccac ccccaccatc |
| 3841 | caggtggaga ccctgagaag gaccctggga gctctgggaa tttggagtga ccaaaggtgt |
| 3901 | gccctgtaca caggcgagga ccctgcacct ggatgggggt ccctgtgggt caaattgggg |
| 3961 | ggaggtgctg tgggagtaaa atactgaata tatgagtttt tcagttttga aaaaaaaaaa |
| 4021 | aaaaaaa |

[0633] In an embodiment, the hTERT is encoded by a nucleic acid having a sequence at least 80%, 85%, 90%, 95%, 96, 97%, 98%, or 99% identical to the sequence of SEQ ID NO: 111. In an embodiment, the hTERT is encoded by a nucleic acid of SEQ ID NO: 111.

[0634] Activation and Expansion of Immune Effector Cells (e.g., T Cells)

[0635] Immune effector cells, such as T cells, may be activated and expanded generally using methods as described, for example, in U.S. Pat. Nos. 6,352,694; 6,534,055; 6,905,680; 6,692,964; 5,858,358; 6,887,466; 6,905,681; 7,144,575; 7,067,318; 7,172,869; 7,232,566; 7,175,843; 5,883,223; 6,905,874; 6,797,514; 6,867,041; and U.S. Patent Application Publication No. 20060121005.

[0636] Generally, a population of immune effector cells, e.g., T cells may be expanded by contact with a surface having attached thereto an agent that stimulates a CD3/TCR complex associated signal and a ligand that stimulates a costimulatory molecule on the surface of the immune effector cells, e.g., T cells. In particular, T cell populations may be stimulated as described herein, such as by contact with an anti-CD3 antibody, or antigen-binding fragment thereof, or an anti-CD2 antibody immobilized on a surface, or by contact with a protein kinase C activator (e.g., bryostatin) in conjunction with a calcium ionophore. For co-stimulation of an accessory molecule on the surface of the T cells, a ligand that binds the accessory molecule is used. For example, a population of T cells can be contacted with an anti-CD3 antibody and an anti-CD28 antibody, under conditions appropriate for stimulating proliferation of the T cells. To stimulate proliferation of either CD4+ T cells or CD8+ T cells, an anti-CD3 antibody and an anti-CD28 antibody. Examples of an anti-CD28 antibody include 9.3, B-T3, XR-CD28 (Diaclone, Besançon, France) can be used as can other methods commonly known in the art (Berg et al., Transplant Proc. 30(8):3975-3977, 1998; Haanen et al., J. Exp. Med. 190(9):13191328, 1999; Garland et al., J. Immunol Meth. 227(1-2):53-63, 1999).

[0637] In certain aspects, the primary stimulatory signal and the costimulatory signal for the T cell may be provided by different protocols. For example, the agents providing each signal may be in solution or coupled to a surface. When coupled to a surface, the agents may be coupled to the same surface (i.e., in “cis” formation) or to separate surfaces (i.e., in “trans” formation). Alternatively, one agent may be coupled to a surface and the other agent in solution. In one aspect, the agent providing the costimulatory signal is bound to a cell surface and the agent providing the primary activation signal is in solution or coupled to a surface. In certain aspects, both agents can be in solution. In one aspect, the agents may be in soluble form, and then cross-linked to a surface, such as a cell expressing Fc receptors or an antibody or other binding agent which will bind to the agents. In this regard, see for example, U.S. Patent Application Publication Nos. 20040101519 and 20060034810 for artificial antigen presenting cells (aAPCs) that are contemplated for use in activating and expanding T cells in the present disclosure.

[0638] In one aspect, the two agents are immobilized on beads, either on the same bead, i.e., “cis,” or to separate beads, i.e., “trans.” By way of example, the agent providing the primary activation signal is an anti-CD3 antibody or an antigen-binding fragment thereof and the agent providing the costimulatory signal is an anti-CD28 antibody or antigen-binding fragment thereof; and both agents are co-immobilized to the same bead in equivalent molecular amounts. In one aspect, a 1:1 ratio of each antibody bound to the beads for CD4+ T cell expansion and T cell growth is used. In certain aspects of the present disclosure, a ratio of anti CD3:CD28 antibodies bound to the beads is used such that an increase in T cell expansion is observed as compared to the expansion observed using a ratio of 1:1. In one particular aspect an increase of from about 1 to about 3 fold is observed as compared to the expansion observed using a ratio of 1:1. In one aspect, the ratio of CD3:CD28 antibody bound to the beads ranges from 100:1 to 1:100 and all integer values there between. In one aspect of the present disclosure, more anti-CD28 antibody is bound to the particles than anti-CD3 antibody, i.e., the ratio of CD3:CD28 is less than one. In certain aspects of the invention, the ratio of anti CD28 antibody to anti CD3 antibody bound to the beads is greater than 2:1. In one particular aspect, a 1:100 CD3:CD28 ratio of antibody bound to beads is used. In one aspect, a 1:75 CD3:CD28 ratio of antibody bound to beads is used. In a further aspect, a 1:50 CD3:CD28 ratio of antibody bound to beads is used. In one aspect, a 1:30 CD3:CD28 ratio of antibody bound to beads is used. In one preferred aspect, a 1:10 CD3:CD28 ratio of antibody bound to beads is used. In one aspect, a 1:3 CD3:CD28 ratio of antibody bound to the beads is used. In yet one aspect, a 3:1 CD3:CD28 ratio of antibody bound to the beads is used.

[0639] Ratios of particles to cells from 1:500 to 500:1 and any integer values in between may be used to stimulate T cells or other target cells. As those of ordinary skill in the art can readily appreciate, the ratio of particles to cells may depend on particle size relative to the target cell. For example, small sized beads could only bind a few cells, while larger beads could bind many. In certain aspects the ratio of cells to particles ranges from 1:100 to 100:1 and any integer values in-between and in further aspects the ratio comprises 1:9 to 9:1 and any integer values in between, can also be used to stimulate T cells. The ratio of anti-CD3- and anti-CD28-coupled particles to T cells that result in T cell stimulation can vary as noted above, however certain preferred values include 1:100, 1:50, 1:40, 1:30, 1:20, 1:10, 1:9, 1:8, 1:7, 1:6, 1:5, 1:4, 1:3, 1:2, 1:1, 2:1, 3:1, 4:1, 5:1, 6:1, 7:1, 8:1, 9:1, 10:1, and 15:1 with one preferred ratio being at least 1:1 particles per T cell. In one aspect, a ratio of particles to cells of 1:1 or less is used. In one particular aspect, a preferred particle: cell ratio is 1:5. In further aspects, the ratio of particles to cells can be varied depending on the day of stimulation. For example, in one aspect, the ratio of particles to cells is from 1:1 to 10:1 on the first day and additional particles are added to the cells every day or every other day thereafter for up to 10 days, at final ratios of from 1:1 to 1:10 (based on cell counts on the day of addition). In one particular aspect, the ratio of particles to cells is 1:1 on the first day of stimulation and adjusted to 1:5 on the third and fifth days of stimulation. In one aspect, particles are added on a daily or every other day basis to a final ratio of 1:1 on the first day, and 1:5 on the third and fifth days of stimulation. In one aspect, the ratio of particles to cells is 2:1 on the first day of stimulation and adjusted to 1:10 on the third and fifth days of stimulation. In one aspect, particles are added on a daily or every other day basis to a final ratio of 1:1 on the first day, and 1:10 on the third and fifth days of stimulation. One of skill in the art will appreciate that a variety of other ratios may be suitable for use in the present disclosure. In particular, ratios will vary depending on particle size and on cell size and type. In one aspect, the most typical ratios for use are in the neighborhood of 1:1, 2:1 and 3:1 on the first day.

[0640] In further aspects of the present disclosure, the cells, such as T cells, are combined with agent-coated beads, the beads and the cells are subsequently separated, and then the cells are cultured. In an alternative aspect, prior to culture, the agent-coated beads and cells are not separated but are cultured together. In a further aspect, the beads and cells are first concentrated by application of a force, such as a magnetic force, resulting in increased ligation of cell surface markers, thereby inducing cell stimulation.

[0641] By way of example, cell surface proteins may be ligated by allowing paramagnetic beads to which anti-CD3 and anti-CD28 are attached (3×28 beads) to contact the T cells. In one aspect the cells (for example, 10⁴ to 10⁹ T cells) and beads (for example, DYNABEADS® M-450 CD3/CD28 T paramagnetic beads at a ratio of 1:1) are combined in a buffer, for example PBS (without divalent cations such as, calcium and magnesium). Again, those of ordinary skill in the art can readily appreciate any cell concentration may be used. For example, the target cell may be very rare in the sample and comprise only 0.01% of the sample or the entire sample (i.e., 100%) may comprise the target cell of interest. Accordingly, any cell number is within the context of the present disclosure. In certain aspects, it may be desirable to significantly decrease the volume in which particles and cells are mixed together (i.e., increase the concentration of cells), to ensure maximum contact of cells and particles. For example, in one aspect, a concentration of about 2 billion cells/ml is used. In one aspect, greater than 100 million cells/ml is used. In a further aspect, a concentration of cells of 10, 15, 20, 25, 30, 35, 40, 45, or 50 million cells/ml is used. In yet one aspect, a concentration of cells from 75, 80, 85, 90, 95, or 100 million cells/ml is used. In further aspects, concentrations of 125 or 150 million cells/ml can be used. Using high concentrations can result in increased cell yield, cell activation, and cell expansion. Further, use of high cell concentrations allows more efficient capture of cells that may weakly express target antigens of interest, such as CD28-negative T cells. Such populations of cells may have therapeutic value and would be desirable to obtain in certain aspects. For example, using high concentration of cells allows more efficient selection of CD8+ T cells that normally have weaker CD28 expression.

[0642] In one embodiment, cells transduced with a nucleic acid encoding a CAR, e.g., a CAR described herein, are expanded, e.g., by a method described herein. In one embodiment, the cells are expanded in culture for a period of several hours (e.g., about 2, 3, 4, 5, 6, 7, 8, 9, 10, 15, 18, 21 hours) to about 14 days (e.g., 1, 2, 3, 4, 5, 6, 7, 8, 9, 10, 11, 12, 13 or 14 days). In one embodiment, the cells are expanded for a period of 4 to 9 days. In one embodiment, the cells are expanded for a period of 8 days or less, e.g., 7, 6 or 5 days. In one embodiment, the cells, e.g., a CAR-expressing cell described herein, are expanded in culture for 5 days, and the resulting cells are more potent than the same cells expanded in culture for 9 days under the same culture conditions. Potency can be defined, e.g., by various T cell functions, e.g. proliferation, target cell killing, cytokine production, activation, migration, or combinations thereof. In one embodiment, the cells, e.g., a CAR-expressing cell described herein, expanded for 5 days show at least a one, two, three or four fold increase in cells doublings upon antigen stimulation as compared to the same cells expanded in culture for 9 days under the same culture conditions. In one embodiment, the cells, e.g., the cells expressing a CAR described herein, are expanded in culture for 5 days, and the resulting cells exhibit higher proinflammatory cytokine production, e.g., IFN-γ and/or GM-CSF levels, as compared to the same cells expanded in culture for 9 days under the same culture conditions. In one embodiment, the cells, e.g., a CAR-expressing cell described herein, expanded for 5 days show at least a one, two, three, four, five, tenfold or more increase in pg/ml of proinflammatory cytokine production, e.g., IFN-γ and/or GM-CSF levels, as compared to the same cells expanded in culture for 9 days under the same culture conditions.

[0643] In one aspect of the present disclosure, the mixture may be cultured for several hours (about 3 hours) to about 14 days or any hourly integer value in between. In one aspect, the mixture may be cultured for 21 days. In one aspect of the invention the beads and the T cells are cultured together for about eight days. In one aspect, the beads and T cells are cultured together for 2-3 days. Several cycles of stimulation may also be desired such that culture time of T cells can be 60 days or more. Conditions appropriate for T cell culture include an appropriate media (e.g., Minimal Essential Media or RPMI Media 1640 or, X-vivo 15, (Lonza)) that may contain factors necessary for proliferation and viability, including serum (e.g., fetal bovine or human serum), interleukin-2 (IL-2), insulin, IFN-γ, IL-4, IL-7, GM-CSF, IL-10, IL-12, IL-15, TGFβ, and TNF-α or any other additives for the growth of cells known to the skilled artisan. Other additives for the growth of cells include, but are not limited to, surfactant, plasmanate, and reducing agents such as N-acetyl-cysteine and 2-mercaptoethanol. Media can include RPMI 1640, AIM-V, DMEM, MEM, α-MEM, F-12, X-Vivo 15, and X-Vivo 20, Optimizer, with added amino acids, sodium pyruvate, and vitamins, either serum-free or supplemented with an appropriate amount of serum (or plasma) or a defined set of hormones, and/or an amount of cytokine(s) sufficient for the growth and expansion of T cells. Antibiotics, e.g., penicillin and streptomycin, are included only in experimental cultures, not in cultures of cells that are to be infused into a subject. The target cells are maintained under conditions necessary to support growth, for example, an appropriate temperature (e.g., 37° C.) and atmosphere (e.g., air plus 5% CO₂).

[0644] In one embodiment, the cells are expanded in an appropriate media (e.g., media described herein) that includes one or more interleukin that result in at least a 200-fold (e.g., 200-fold, 250-fold, 300-fold, 350-fold) increase in cells over a 14 day expansion period, e.g., as measured by a method described herein such as flow cytometry. In one embodiment, the cells are expanded in the presence IL-15 and/or IL-7 (e.g., IL-15 and IL-7).

[0645] In embodiments, methods described herein, e.g., CAR-expressing cell manufacturing methods, comprise removing T regulatory cells, e.g., CD25+ T cells, from a cell population, e.g., using an anti-CD25 antibody, or fragment thereof, or a CD25-binding ligand, IL-2. Methods of removing T regulatory cells, e.g., CD25+ T cells, from a cell population are described herein. In embodiments, the methods, e.g., manufacturing methods, further comprise contacting a cell population (e.g., a cell population in which T regulatory cells, such as CD25+ T cells, have been depleted; or a cell population that has previously contacted an anti-CD25 antibody, fragment thereof, or CD25-binding ligand) with IL-15 and/or IL-7. For example, the cell population (e.g., that has previously contacted an anti-CD25 antibody, fragment thereof, or CD25-binding ligand) is expanded in the presence of IL-15 and/or IL-7.

[0646] In some embodiments a CAR-expressing cell described herein is contacted with a composition comprising a interleukin-15 (IL-15) polypeptide, a interleukin-15 receptor alpha (IL-15Ra) polypeptide, or a combination of both a IL-15 polypeptide and a IL-15Ra polypeptide e.g., hetIL-15, during the manufacturing of the CAR-expressing cell, e.g., ex vivo. In embodiments, a CAR-expressing cell described herein is contacted with a composition comprising a IL-15 polypeptide during the manufacturing of the CAR-expressing cell, e.g., ex vivo. In embodiments, a CAR-expressing cell described herein is contacted with a composition comprising a combination of both a IL-15 polypeptide and a IL-15 Ra polypeptide during the manufacturing of the CAR-expressing cell, e.g., ex vivo. In embodiments, a CAR-expressing cell described herein is contacted with a composition comprising hetIL-15 during the manufacturing of the CAR-expressing cell, e.g., ex vivo.

[0647] In one embodiment the CAR-expressing cell described herein is contacted with a composition comprising hetIL-15 during ex vivo expansion. In an embodiment, the CAR-expressing cell described herein is contacted with a composition comprising an IL-15 polypeptide during ex vivo expansion. In an embodiment, the CAR-expressing cell described herein is contacted with a composition comprising both an IL-15 polypeptide and an IL-15Ra polypeptide during ex vivo expansion. In one embodiment the contacting results in the survival and proliferation of a lymphocyte subpopulation, e.g., CD8+ T cells.

[0648] In one embodiment, the cells are cultured (e.g., expanded, simulated, and/or transduced) in media comprising serum. The serum may be, e.g., human AB serum (hAB). In some embodiments, the hAB serum is present at about 2%, about 5%, about 2-3%, about 3-4%, about 4-5%, or about 2-5%. 2% and 5% serum are each suitable levels that allow for many fold expansion of T cells. Furthermore, as shown in Smith et al., “Ex vivo expansion of human T cells for adoptive immunotherapy using the novel Xeno-free CTS Immune Cell Serum Replacement” Clinical & Translational Immunology (2015) 4, e31; doi:10.1038/cti.2014.31, medium containing 2% human AB serum is suitable for ex vivo expansion of T cells.

[0649] T cells that have been exposed to varied stimulation times may exhibit different characteristics. For example, typical blood or apheresed peripheral blood mononuclear cell products have a helper T cell population (TH, CD4+) that is greater than the cytotoxic or suppressor T cell population (TC, CD8+). Ex vivo expansion of T cells by stimulating CD3 and CD28 receptors produces a population of T cells that prior to about days 8-9 consists predominately of TH cells, while after about days 8-9, the population of T cells comprises an increasingly greater population of TC cells. Accordingly, depending on the purpose of treatment, infusing a subject with a T cell population comprising predominately of TH cells may be advantageous. Similarly, if an antigen-specific subset of TC cells has been isolated it may be beneficial to expand this subset to a greater degree.

[0650] Further, in addition to CD4 and CD8 markers, other phenotypic markers vary significantly, but in large part, reproducibly during the course of the cell expansion process. Thus, such reproducibility enables the ability to tailor an activated T cell product for specific purposes.

[0651] In some embodiments, cells transduced with a nucleic acid encoding a CAR, e.g., a CAR described herein, can be selected for administration based upon, e.g., protein expression levels of one or more of CCL20, GM-CSF, IFNγ, IL-10, IL-13, IL-17a, IL-2, IL-21, IL-4, IL-5, IL-6, IL-9, TNFα and/or combinations thereof. In some embodiments, cells transduced with a nucleic acid encoding a CAR, e.g., a CAR described herein, can be selected for administration based upon, e.g., protein expression levels of CCL20, IL-17a, IL-6 and combinations thereof.

[0652] Once a CAR is constructed, various assays can be used to evaluate the activity of the molecule, such as but not limited to, the ability to expand T cells following antigen stimulation, sustain T cell expansion in the absence of re-stimulation, and anti-cancer activities in appropriate in vitro and animal models. Assays to evaluate the effects of a CAR or a cell expressing a CAR (e.g., a cell of the invention) are described in further detail in paragraphs 695-703 of International Publication WO2015/142675, filed Mar. 13, 2015, which is incorporated by reference in its entirety.

[0653] Assays to evaluate the effects of a CAR or CAR-expressing cell (e.g., a cell of the invention) are described in further detail below.

[0654] For example, the cytotoxicity assay described above can be modified to evaluate the cytotoxic activity of a CAR-expressing cell in vitro. Cells of the invention can be mixed with target cells, e.g., cells expressing the antigen targeted by the CAR, at varying ratios of effector to target (E:T). After sufficient incubation to allow cell-mediated cytolysis the supernatant from each ratio sample is harvested and then measured for released 51Cr. To monitor cell-mediated persistence or proliferation, the cells of the invention can be monitored by, for example, flow cytometry.

[0655] Furthermore, animal models similar to those described above can be administered a cell of the invention, to evaluate the ability of the cell.

[0656] Other assays, including those described in the Example section herein as well as those that are known in the art can also be used to evaluate the CAR constructs and methods of the invention.

### Therapeutic Application

[0657] In accordance with any method described herein, in embodiments, a subject has a cancer, e.g., a solid tumor or tumor associated with MDSCs or TAMs. In embodiments, a composition described herein can be used to treat a cancer described herein. In embodiments, an inhibitor of a pro-M2 macrophage molecule, e.g., as described herein, e.g., an anti-IL-13 antibody, an anti-IL-4 antibody or an anti-IL-13Rα1 antibody, is used in combination with a CAR-expressing cell (e.g., CD123 CAR expressing cell) to treat a cancer, e.g., Hodgkin lymphoma.

[0658] The present invention provides, among other things, compositions and methods for treating a disease associated with expression of an antigen (e.g., a solid tumor antigen or antigen expressed on a tumor associated with MDSCs or TAMs) or condition associated with cells which express the antigen (e.g., a solid tumor antigen or antigen expressed on a tumor associated with MDSCs or TAMs) including, e.g., a proliferative disease such as a cancer or malignancy or a precancerous condition such as a myelodysplasia, a myelodysplastic syndrome or a preleukemia; or a noncancer related indication associated with cells which express the antigen (e.g., a solid tumor antigen or antigen expressed on a tumor associated with MDSCs or TAMs). In one aspect, a cancer associated with expression of an antigen is a hematological cancer. In one aspect, a hematological cancer includes but is not limited to AML, myelodysplastic syndrome, ALL, chronic myeloid leukemia, blastic plasmacytoid dendritic cell neoplasm, myeloproliferative neoplasms, Hodgkin lymphoma, and the like. In embodiments, disease associated with expression of CD123 includes, but are not limited to, e.g., atypical and/or non-classical cancers, malignancies, precancerous conditions or proliferative diseases associated with expression of CD123. Non-cancer related indications associated with expression of an antigen (e.g., CD123) may also be included. In some embodiments, the disorder is a disease associated with expression of CD19, e.g., a CD19-expressing B cell malignancy as described herein.

[0659] In one aspect, the invention provides methods for treating a disease associated with expression of antigen (e.g., a solid tumor antigen or antigen expressed on a tumor associated with MDSCs or TAMs). In one aspect, the invention provides methods for treating a disease wherein part of the tumor is negative for the antigen (e.g., a solid tumor antigen or antigen expressed on a tumor associated with MDSCs or TAMs) and part of the tumor is positive for the antigen (e.g., a solid tumor antigen or antigen expressed on a tumor associated with MDSCs or TAMs). For example, the CAR described herein is useful for treating subjects that have undergone treatment for a disease associated with elevated expression of the antigen (e.g., a solid tumor antigen or antigen expressed on a tumor associated with MDSCs or TAMs), wherein the subject that has undergone treatment for elevated levels of the antigen (e.g., a solid tumor antigen or antigen expressed on a tumor associated with MDSCs or TAMs) exhibits a disease associated with elevated levels of the antigen (e.g., a solid tumor antigen or antigen expressed on a tumor associated with MDSCs or TAMs). In embodiments, the CAR is useful for treating subjects that have undergone treatment for a disease associated with expression of the antigen (e.g., a solid tumor antigen or antigen expressed on a tumor associated with MDSCs or TAMs), wherein the subject that has undergone treatment related to expression of the antigen (e.g., a solid tumor antigen or antigen expressed on a tumor associated with MDSCs or TAMs) exhibits a disease associated with expression of the antigen (e.g., a solid tumor antigen or antigen expressed on a tumor associated with MDSCs or TAMs).

[0660] In one aspect, provided herein is a method of inhibiting growth of an antigen-expressing tumor cell (e.g., a solid tumor or tumor associated with MDSCs or TAMs), comprising contacting the tumor cell with a CAR-expressing cell (e.g., as described herein) such that the CAR-expressing cell is activated in response to the antigen and targets the cancer cell, wherein the growth of the tumor is inhibited. The method can comprise administration of a inhibitor of a pro-M2 macrophage molecule, e.g., described herein.

[0661] In one aspect, the invention pertains to a method of treating cancer in a subject. The method comprises administering to the subject a CAR-expressing cell described herein such that the cancer is treated in the subject. The cellular therapy is provided in combination with a inhibitor of a pro-M2 macrophage molecule, e.g., described herein.

[0662] The disclosure includes a type of cellular therapy where immune effector cells, e.g., T cells or NK cells, are genetically modified to express a chimeric antigen receptor (CAR) and the CAR-expressing cell is infused to a recipient in need thereof. The infused cell is able to kill tumor cells in the recipient. The cellular therapy is provided in combination with a inhibitor of a pro-M2 macrophage molecule, e.g., described herein. Unlike antibody therapies, CAR-modified immune effector cells, e.g., the CAR-modified T cells or CAR-modified NK cells) are able to replicate in vivo resulting in long-term persistence that can lead to sustained tumor control. In various aspects, the immune effector cells, e.g., T cells or NK cells, administered to the patient, or their progeny, persist in the patient for at least four months, five months, six months, seven months, eight months, nine months, ten months, eleven months, twelve months, thirteen months, fourteen month, fifteen months, sixteen months, seventeen months, eighteen months, nineteen months, twenty months, twenty-one months, twenty-two months, twenty-three months, two years, three years, four years, or five years after administration of the immune effector cell, e.g., T cell or NK cell, to the patient.

[0663] The invention also includes a type of cellular therapy where immune effector cells, e.g., T cells or NK cells, are modified, e.g., by in vitro transcribed RNA, to transiently express a chimeric antigen receptor (CAR) and the CAR-expressing cell, e.g., CAR T cell or CAR NK cell) is infused to a recipient in need thereof. The cellular therapy is provided in combination with a inhibitor of a pro-M2 macrophage molecule, e.g., described herein. The infused cell is able to kill tumor cells in the recipient. Thus, in various aspects, the immune effector cells, e.g., T cells or NK cells, administered to the patient, is present for less than one month, e.g., three weeks, two weeks, one week, after administration of the immune effector cell, e.g., T cell or NK cell, to the patient.

[0664] Without wishing to be bound by any particular theory, the anti-tumor immunity response elicited by the CAR-modified immune effector cells, e.g., T cells or NK cells, may be an active or a passive immune response, or alternatively may be due to a direct vs indirect immune response. In one aspect, the CAR transduced immune effector cells, e.g., T cells or NK cells, exhibit specific proinflammatory cytokine secretion and potent cytolytic activity in response to human cancer cells expressing the target antigen, resist soluble target antigen inhibition, mediate bystander killing and mediate regression of an established human tumor. For example, antigen-less tumor cells within a heterogeneous field of antigen-expressing tumor may be susceptible to indirect destruction by antigen-redirected immune effector cell, e.g., T cells or NK cells that has previously reacted against adjacent antigen-positive cancer cells.

[0665] In one aspect, the fully-human CAR-modified immune effector cells (e.g., T cells or NK cells) of the invention may be a type of vaccine for ex vivo immunization and/or in vivo therapy in a mammal. In one aspect, the mammal is a human.

[0666] With respect to ex vivo immunization, at least one of the following occurs in vitro prior to administering the cell, e.g., T cell or NK cell, into a mammal: i) expansion of the cells, ii) introducing a nucleic acid encoding a CAR to the cells or iii) cryopreservation of the cells.

[0667] Ex vivo procedures are well known in the art and are discussed more fully below. Briefly, cells are isolated from a mammal (e.g., a human) and genetically modified (i.e., transduced or transfected in vitro) with a vector expressing a CAR disclosed herein. The CAR-modified cell can be administered to a mammalian recipient to provide a therapeutic benefit. The mammalian recipient may be a human and the CAR-modified cell can be autologous with respect to the recipient. Alternatively, the cells can be allogeneic, syngeneic or xenogeneic with respect to the recipient.

[0668] The procedure for ex vivo expansion of hematopoietic stem and progenitor cells is described in U.S. Pat. No. 5,199,942, incorporated herein by reference, can be applied to the cells of the present invention. Other suitable methods are known in the art, therefore the present invention is not limited to any particular method of ex vivo expansion of the cells. Briefly, ex vivo culture and expansion of T cells comprises: (1) collecting CD34+ hematopoietic stem and progenitor cells from a mammal from peripheral blood harvest or bone marrow explants; and (2) expanding such cells ex vivo. In addition to the cellular growth factors described in U.S. Pat. No. 5,199,942, other factors such as flt3-L, IL-1, IL-3 and c-kit ligand, can be used for culturing and expansion of the cells.

[0669] In addition to using a cell-based vaccine in terms of ex vivo immunization, the present invention also provides compositions and methods for in vivo immunization to elicit an immune response directed against an antigen in a patient.

[0670] Generally, the cells activated and expanded as described herein may be utilized in the treatment and prevention of diseases that arise in individuals who are immunocompromised. In particular, the CAR-modified immune effector cells (e.g., T cells or NK cells) of the invention are used in the treatment of diseases, disorders and conditions described herein, e.g., disorders or conditions associated with expression of an antigen described herein, e.g., a solid tumor antigen or antigen expressed on a tumor associated with MDSCs or TAMs. In certain aspects, the cells of the invention are used in the treatment of patients at risk for developing diseases, disorders and conditions described herein, e.g., disorders or conditions associated with expression of an antigen described herein, e.g., e.g., a solid tumor antigen or antigen expressed on a tumor associated with MDSCs or TAMs. Thus, the present invention provides methods for the treatment or prevention of diseases, disorders and conditions described herein, e.g., disorders or conditions associated with expression of an antigen described herein, e.g., e.g., a solid tumor antigen or antigen expressed on a tumor associated with MDSCs or TAMs, comprising administering to a subject in need thereof, a therapeutically effective amount of the CAR-modified immune effector cells (e.g., T cells or NK cells) described herein in combination with a inhibitor of a pro-M2 macrophage molecule, e.g., described herein.

[0671] In one aspect, the CAR-expressing cells (CART cells or CAR-expressing NK cells) of the inventions may be used to treat a proliferative disease such as a cancer or malignancy or is a precancerous condition such as a myelodysplasia, a myelodysplastic syndrome or a preleukemia. In one aspect, the cancer is a hematological cancer preleukemia, a hyperproliferative disorder, a hyperplasia or a dysplasia, which is characterized by abnormal growth of cells.

[0672] In one aspect, the CAR-expressing cells (CART cells or CAR-expressing NK cells) of the invention are used to treat a cancer, wherein the cancer is a hematological cancer. Hematological cancer conditions are the types of cancer such as leukemia and malignant lymphoproliferative conditions that affect blood, bone marrow and the lymphatic system.

[0673] In one aspect, the compositions and CAR-expressing cells (CART cells or CAR-expressing NK cells) of the present invention are particularly useful for treating a solid tumor such as, for example, malignancies, e.g., sarcomas, adenocarcinomas, and carcinomas, of the various organ systems, such as those affecting pancreas, liver, lung, breast, ovary, lymphoid, gastrointestinal (e.g., colon), genitourinary tract (e.g., renal, urothelial cells), prostate, and pharynx. In one aspect, the compositions and CAR-expressing cells (CART cells or CAR-expressing NK cells) of the present invention are particularly useful for treating Hodgkin lymphoma.

[0674] Also provided herein are methods for inhibiting the proliferation of or reducing an antigen-expressing cell population (e.g., solid tumor cell population or tumor associated with MDSCs or TAMs cell population), the methods comprising contacting a population of cells comprising an antigen-expressing cell with a CAR-expressing cell that binds to the antigen-expressing cell. In a specific aspect, the present invention provides methods for inhibiting the proliferation of or reducing the population of cancer cells expressing the antigen, the methods comprising contacting the antigen-expressing cancer cell population with a CAR-expressing cell that binds to the antigen-expressing cell, in combination with an inhibitor of a pro-M2 macrophage molecule, e.g., described herein. In one aspect, the present invention provides methods for inhibiting the proliferation or reducing the population of cancer cells expressing an antigen, the methods comprising contacting the antigen-expressing cancer cell population with a CAR-expressing cell that binds to the antigen-expressing cell, in combination with an inhibitor of a pro-M2 macrophage molecule, e.g., described herein. In certain aspects, the CAR-expressing cell, when administered in combination with an inhibitor of a pro-M2 macrophage molecule, e.g., described herein, reduces the quantity, number, amount or percentage of cells and/or cancer cells by at least 25%, at least 30%, at least 40%, at least 50%, at least 65%, at least 75%, at least 85%, at least 95%, or at least 99% in a subject with or animal model for Hodgkin lymphoma or another cancer associated with the antigen-expressing cells relative to a negative control or relative to either monotherapy alone. In one aspect, the subject is a human.

[0675] The present invention also provides methods for preventing, treating and/or managing a disease associated with antigen expressing cell (e.g., a solid tumor or tumor associated with MDSCs or TAMs, e.g., Hodgkin lymphoma), the methods comprising administering to a subject in need a CAR-expressing cell that binds to the antigen-expressing cell in combination with an inhibitor of a pro-M2 macrophage molecule, e.g., described herein. In one aspect, the subject is a human.

[0676] The present invention also provides methods for preventing, treating and/or managing a disease associated with antigen-expressing cells, the methods comprising administering to a subject in need a CAR-expressing cell that binds to the antigen-expressing cell, in combination with an inhibitor of a pro-M2 macrophage molecule, e.g., described herein. In one aspect, the subject is a human.

[0677] The present invention provides methods for preventing relapse of cancer associated with antigen-expressing cells, the methods comprising administering to a subject in need thereof a CAR-expressing cell of the invention that binds to the antigen-expressing cell, in combination with a an inhibitor of a pro-M2 macrophage molecule, e.g., described herein. In one aspect, the methods comprise administering to the subject in need thereof an effective amount of a CAR-expressing cell described herein that binds to the antigen-expressing cell in combination with an effective amount of another therapy (e.g., an inhibitor of a pro-M2 macrophage molecule, e.g., described herein).

[0678] In another aspect, the invention provides a method of treating a subject having a disease associated with expression of a tumor antigen (e.g., a subject having a cancer (e.g., a solid tumor or a tumor associated with tumor-associated macrophages)). The method includes administering to the subject (i) a CAR therapy including a cell, e.g., a population of immune effector cells, including (e.g., expressing) a chimeric antigen receptor (CAR), wherein the CAR includes a tumor antigen binding domain that binds to CD123, a transmembrane domain, and an intracellular signaling domain; and (ii) a tumor targeting therapy. In some embodiments, the CD123 CAR is administered in an amount and/or time sufficient to result in inhibition of an M2 macrophage activity. In embodiments, the inhibition of the M2 macrophage activity comprises inhibition of polarization of a macrophage to an M2 phenotype, and/or reversal of a phenotype of an M2 macrophage.

[0679] In other embodiments, the tumor targeting therapy is or includes a CD19-inhibiting or depleting therapy, e.g., a therapy that includes a CD19 inhibitor. In some embodiments, the CD19 inhibitor is a CD19 antibody, e.g., a CD19 bispecific antibody (e.g., a bispecific T cell engager that targets CD19, e.g., blinatumomab). In some embodiments, the bispecific T cell engager antibody molecule is an antibody molecule described in Bargou et al., “Tumor regression in cancer patients by very low doses of a T cell-engaging antibody.” Science. 2008 Aug. 15; 321(5891):974-7. doi: 10.1126/science.1158545.

[0680] In some embodiments, the tumor targeting therapy includes a CD19 CAR-expressing cell, e.g., a CD19 CART cell, or an anti-CD19 antibody (e.g., an anti-CD19 mono- or bispecific antibody) or a fragment or conjugate thereof. In one embodiment, the anti-CD19 antibody is a humanized antigen binding domain as described in WO2014/153270 (e.g., Table 3 of WO2014/153270) incorporated herein by reference, or a conjugate thereof. Other exemplary anti-CD19 antibodies or fragments or conjugates thereof, include but are not limited to, blinatumomab, SAR3419 (Sanofi), MEDI-551 (Medlmmune LLC), Combotox, DT2219ARL (Masonic Cancer Center), MOR-208 (also called XmAb-5574; MorphoSys), XmAb-5871 (Xencor), MDX-1342 (Bristol-Myers Squibb), SGN-CD19A (Seattle Genetics), and AFM11 (Affimed Therapeutics). See, e.g., Hammer. MAbs. 4.5(2012): 571-77. Blinatomomab is a bispecific antibody comprised of two scFvs—one that binds to CD19 and one that binds to CD3. Blinatomomab directs T cells to attack cancer cells. See, e.g., Hammer et al.; Clinical Trial Identifier No. NCT00274742 and NCT01209286. MEDI-551 is a humanized anti-CD19 antibody with a Fc engineered to have enhanced antibody-dependent cell-mediated cytotoxicity (ADCC). See, e.g., Hammer et al.; and Clinical Trial Identifier No. NCT01957579. Combotox is a mixture of immunotoxins that bind to CD19 and CD22. The immunotoxins are made up of scFv antibody fragments fused to a deglycosylated ricin A chain. See, e.g., Hammer et al.; and Herrera et al. J. Pediatr. Hematol. Oncol. 31.12(2009):936-41; Schindler et al. Br. J. Haematol. 154.4(2011):471-6. DT2219ARL is a bispecific immunotoxin targeting CD19 and CD22, comprising two scFvs and a truncated diphtheria toxin. See, e.g., Hammer et al.; and Clinical Trial Identifier No. NCT00889408. SGN-CD19A is an antibody-drug conjugate (ADC) comprised of an anti-CD19 humanized monoclonal antibody linked to a synthetic cytotoxic cell-killing agent, monomethyl auristatin F (MMAF). See, e.g., Hammer et al.; and Clinical Trial Identifier Nos. NCT01786096 and NCT01786135. SAR3419 is an anti-CD19 antibody-drug conjugate (ADC) comprising an anti-CD19 humanized monoclonal antibody conjugated to a maytansine derivative via a cleavable linker. See, e.g., Younes et al. J. Clin. Oncol. 30.2(2012): 2776-82; Hammer et al.; Clinical Trial Identifier No. NCT00549185; and Blanc et al. Clin Cancer Res. 2011; 17:6448-58. XmAb-5871 is an Fc-engineered, humanized anti-CD19 antibody. See, e.g., Hammer et al. MDX-1342 is a human Fc-engineered anti-CD19 antibody with enhanced ADCC. See, e.g., Hammer et al. In embodiments, the antibody molecule is a bispecific anti-CD19 and anti-CD3 molecule. For instance, AFM11 is a bispecific antibody that targets CD19 and CD3. See, e.g., Hammer et al.; and Clinical Trial Identifier No. NCT02106091. In some embodiments, an anti-CD19 antibody described herein is conjugated or otherwise bound to a therapeutic agent, e.g., a chemotherapeutic agent, peptide vaccine (such as that described in Izumoto et al. 2008 J Neurosurg 108:963-971), immunosuppressive agent, or immunoablative agent, e.g., cyclosporin, azathioprine, methotrexate, mycophenolate, FK506, CAMPATH, anti-CD3 antibody, cytoxin, fludarabine, rapamycin, mycophenolic acid, steroid, FR901228, or cytokine.

### Hematologic Cancers

[0681] Hematological cancer conditions are the types of cancer such as leukemia, lymphoma and malignant lymphoproliferative conditions that affect blood, bone marrow and the lymphatic system.

[0682] In one embodiment, the hematologic cancer is leukemia. In one embodiment, the cancer is selected from the group consisting of one or more acute leukemias including but not limited to B-cell acute lymphoid leukemia (BALL), T-cell acute lymphoid leukemia (TALL), small lymphocytic leukemia (SLL), acute lymphoid leukemia (ALL); one or more chronic leukemias including but not limited to chronic myelogenous leukemia (CML), chronic lymphocytic leukemia (CLL); additional hematologic cancers or hematologic conditions including, but not limited to mantle cell lymphoma (MCL), B cell prolymphocytic leukemia, blastic plasmacytoid dendritic cell neoplasm, Burkitt's lymphoma, diffuse large B cell lymphoma, follicular lymphoma, hairy cell leukemia, small cell- or a large cell-follicular lymphoma, malignant lymphoproliferative conditions, MALT lymphoma, Marginal zone lymphoma, multiple myeloma, myelodysplasia and myelodysplastic syndrome, non-Hodgkin lymphoma, Hodgkin lymphoma, plasmablastic lymphoma, plasmacytoid dendritic cell neoplasm, Waldenstrom macroglobulinemia, and “preleukemia” which are a diverse collection of hematological conditions united by ineffective production (or dysplasia) of myeloid blood cells.

[0683] In an embodiment, the cancer is Hodgkin lymphoma. In embodiments, the CAR is a CD123 CAR, e.g., described herein.

[0684] Leukemia can be classified as acute leukemia and chronic leukemia. Acute leukemia can be further classified as acute myelogenous leukemia (AML) and acute lymphoid leukemia (ALL). Chronic leukemia includes chronic myelogenous leukemia (CML) and chronic lymphoid leukemia (CLL). Other related conditions include myelodysplastic syndromes (MDS, formerly known as “preleukemia”) which are a diverse collection of hematological conditions united by ineffective production (or dysplasia) of myeloid blood cells and risk of transformation to AML.

[0685] Lymphoma is a group of blood cell tumors that develop from lymphocytes. Exemplary lymphomas include non-Hodgkin lymphoma and Hodgkin lymphoma. In an embodiment, the cancer is Hodgkin lymphoma. In embodiments, the CAR is a CD123 CAR, e.g., described herein.

[0686] In an aspect, the invention pertains to a method of treating a mammal having a hematological cancer, comprising administering to the mammal an effective amount of the cells expressing a CAR molecule and an inhibitor of a pro-M2 macrophage molecule described herein.

### Solid Cancers

[0687] It is particularly preferred that the methods and compositions of the invention be used to treat solid cancers and solid tumors. Exemplary solid cancers include but are not limited to: uterine cancer, colon cancer, ovarian cancer, rectal cancer, skin cancer, stomach cancer, lung cancer, non-small cell carcinoma of the lung, breast cancer, cancer of the small intestine, testicular cancer, cancer of the anal region, cancer of the endocrine system, cancer of the thyroid gland, cancer of the parathyroid gland, rectal cancer, renal-cell carcinoma, liver cancer, cancer of the esophagus, melanoma, cutaneous or intraocular malignant melanoma, uterine cancer, brain cancer, brain stem glioma, pituitary adenoma, Kaposi's sarcoma, cancer of the adrenal gland, bone cancer, pancreatic cancer, cancer of the head or neck, epidermoid cancer, carcinoma of the endometrium, carcinoma of the vagina, cervical cancer, sarcoma, uterine cancer, stomach cancer, esophageal cancer, colorectal cancer, liver cancer, prostate cancer, carcinoma of the cervix squamous cell cancer, carcinoma of the fallopian tubes, sarcoma of soft tissue, cancer of the urethra, carcinoma of the vulva, cancer of the kidney or ureter, carcinoma of the renal pelvis, spinal axis tumor, cancer of the penis, cancer of the bladder, neoplasm of the central nervous system (CNS), primary CNS lymphoma, tumor angiogenesis, metastatic lesions of said cancers, and/or combinations thereof.

[0688] In one embodiment, the present disclosure provides therapy described herein wherein cells or compostions of the invention is administered to treat a solid tumor, e.g., to inhibit the growth of a solid tumor. In embodiments the cells comprise a CAR molecule that targets, e.g., binds, to a tumor antigen present on a cell or population of cells in the solid tumor. Examples of solid tumors that can be treated with methods disclosed herein include malignancies, e.g., sarcomas, adenocarcinomas, and carcinomas, of the various organ systems, such as those affecting pancreas, liver, lung, breast, ovary, lymphoid, gastrointestinal (e.g., colon), genitourinary tract (e.g., renal, urothelial cells), prostate, and pharynx. Adenocarcinomas include malignancies such as most colon cancers, rectal cancer, renal-cell carcinoma, liver cancer, non-small cell carcinoma of the lung, cancer of the small intestine and cancer of the esophagus. In one embodiment, the solid tumor is a mesothelioma. Metastatic lesions of the aforementioned cancers can also be treated or prevented using the methods and compositions of the invention.

[0689] In one embodiment, the combination therapy described herein is administered to treat a CD19 negative cancer. A CD19 negative cancer can be characterized by CD19 loss (e.g., an antigen loss mutation) or other CD19 alteration that reduces the level of CD19 (e.g., caused by clonal selection of CD19-negative clones). It shall be understood that a CD19-negative cancer need not have 100% loss of CD19, and may retain some partial CD19 expression (e.g., retain some cancer cells that express CD19).

[0690] In one aspect, the present disclosure provides methods of treating cancer by providing to the subject in need thereof immune effector cells (e.g., T cells, NK cells) that are engineered to express an CD123 CAR, wherein the cancer cells express CD123. In one embodiment, the cancer to be treated is Hodgkin lymphoma.

[0691] In one aspect, the present disclosure provides methods of treating cancer by providing to the subject in need thereof immune effector cells (e.g., T cells, NK cells) that are engineered to express an EGFRvIIICAR, wherein the cancer cells express EGFRvIII. In one embodiment, the cancer to be treated is glioblastoma.

[0692] In one aspect, the present disclosure provides methods of treating cancer by providing to the subject in need thereof immune effector cells (e.g., T cells, NK cells) that are engineered to express a mesothelin CAR, wherein the cancer cells express mesothelin. In one embodiment, the cancer to be treated is mesothelioma, malignant pleural mesothelioma, non-small cell lung cancer, small cell lung cancer, squamous cell lung cancer, or large cell lung cancer, pancreatic cancer, pancreatic ductal adenocarcinoma, pancreatic metatstatic, esophageal adenocarcinoma, breast cancer, ovarian cancer, colorectal cancer and bladder cancer, or any combination thereof.

[0693] In one aspect, the present disclosure provides methods of treating cancer by providing to the subject in need thereof immune effector cells (e.g., T cells, NK cells) that are engineered to express a GD2CAR, wherein the cancer cells express GD2. In one embodiment, the cancer to be treated is neuroblastoma.

[0694] In one aspect, the present disclosure provides methods of treating cancer by providing to the subject in need thereof immune effector cells (e.g., T cells, NK cells) that are engineered to express a TnCAR, wherein the cancer cells express Tn antigen. In one embodiment, the cancer to be treated is ovarian cancer, colon cancer, breast cancer, or pancreatic cancer.

[0695] In one aspect, the present disclosure provides methods of treating cancer by providing to the subject in need thereof immune effector cells (e.g., T cells, NK cells) that are engineered to express a sTnCAR, wherein the cancer cells express sTn antigen. In one embodiment, the cancer to be treated is ovarian cancer, colon cancer, breast cancer, or pancreatic cancer.

[0696] In one aspect, the present disclosure provides methods of treating cancer by providing to the subject in need thereof immune effector cells (e.g., T cells, NK cells) that are engineered to express a PSMACAR, wherein the cancer cells express PSMA. In one embodiment, the cancer to be treated is prostate cancer.

[0697] In one aspect, the present disclosure provides methods of treating cancer by providing to the subject in need thereof immune effector cells (e.g., T cells, NK cells) that are engineered to express a TAG72CAR, wherein the cancer cells express TAG72. In one embodiment, the cancer to be treated is gastrointestinal cancer.

[0698] In one aspect, the present disclosure provides methods of treating cancer by providing to the subject in need thereof immune effector cells (e.g., T cells, NK cells) that are engineered to express a CD44v6CAR, wherein the cancer cells express CD44v6. In one embodiment, the cancer to be treated is cervical cancer, AML, or MM.

[0699] In one aspect, the present disclosure provides methods of treating cancer by providing to the subject in need thereof immune effector cells (e.g., T cells, NK cells) that are engineered to express an EPCAMCAR, wherein the cancer cells express EPCAM. In one embodiment, the cancer to be treated is gastrointestinal cancer.

[0700] In one aspect, the present disclosure provides methods of treating cancer by providing to the subject in need thereof immune effector cells (e.g., T cells, NK cells) that are engineered to express a KITCAR, wherein the cancer cells express KIT. In one embodiment, the cancer to be treated is gastrointestinal cancer.

[0701] In one aspect, the present disclosure provides methods of treating cancer by providing to the subject in need thereof immune effector cells (e.g., T cells, NK cells) that are engineered to express a IL-13Ra2CAR, wherein the cancer cells express IL-13Ra2. In one embodiment, the cancer to be treated is glioblastoma.

[0702] In one aspect, the present disclosure provides methods of treating cancer by providing to the subject in need thereof immune effector cells (e.g., T cells, NK cells) that are engineered to express a CD171CAR, wherein the cancer cells express CD171. In one embodiment, the cancer to be treated is neuroblastoma, ovarian cancer, melanoma, breast cancer, pancreatic cancer, colon cancers, or NSCLC (non-small cell lung cancer).

[0703] In one aspect, the present disclosure provides methods of treating cancer by providing to the subject in need thereof immune effector cells (e.g., T cells, NK cells) that are engineered to express a PSCACAR, wherein the cancer cells express PSCA. In one embodiment, the cancer to be treated is prostate cancer.

[0704] In one aspect, the present disclosure provides methods of treating cancer by providing to the subject in need thereof immune effector cells (e.g., T cells, NK cells) that are engineered to express a LewisYCAR, wherein the cancer cells express LewisY. In one embodiment, the cancer to be treated is ovarian cancer, or AML.

[0705] In one aspect, the present disclosure provides methods of treating cancer by providing to the subject in need thereof immune effector cells (e.g., T cells, NK cells) that are engineered to express a PDGFR-betaCAR, wherein the cancer cells express PDGFR-beta. In one embodiment, the cancer to be treated is breast cancer, prostate cancer, GIST (gastrointestinal stromal tumor), CML, DFSP (dermatofibrosarcoma protuberans), or glioma.

[0706] In one aspect, the present disclosure provides methods of treating cancer by providing to the subject in need thereof immune effector cells (e.g., T cells, NK cells) that are engineered to express a SSEA-4CAR, wherein the cancer cells express SSEA-4. In one embodiment, the cancer to be treated is glioblastoma, breast cancer, lung cancer, or stem cell cancer.

[0707] In one aspect, the present disclosure provides methods of treating cancer by providing to the subject in need thereof immune effector cells (e.g., T cells, NK cells) that are engineered to express a Folate receptor alphaCAR, wherein the cancer cells express folate receptor alpha. In one embodiment, the cancer to be treated is ovarian cancer, NSCLC, endometrial cancer, renal cancer, or other solid tumors.

[0708] In one aspect, the present disclosure provides methods of treating cancer by providing to the subject in need thereof immune effector cells (e.g., T cells, NK cells) that are engineered to express an ERBB2CAR, wherein the cancer cells express ERBB2 (Her2/neu). In one embodiment, the cancer to be treated is breast cancer, gastric cancer, colorectal cancer, lung cancer, or other solid tumors.

[0709] In one aspect, the present disclosure provides methods of treating cancer by providing to the subject in need thereof immune effector cells (e.g., T cells, NK cells) that are engineered to express a MUC1CAR, wherein the cancer cells express MUC1. In one embodiment, the cancer to be treated is breast cancer, lung cancer, or other solid tumors.

[0710] In one aspect, the present disclosure provides methods of treating cancer by providing to the subject in need thereof immune effector cells (e.g., T cells, NK cells) that are engineered to express an EGFRCAR, wherein the cancer cells express EGFR. In one embodiment, the cancer to be treated is glioblastoma, SCLC (small cell lung cancer), SCCHN (squamous cell carcinoma of the head and neck), NSCLC, or other solid tumors.

[0711] In one aspect, the present disclosure provides methods of treating cancer by providing to the subject in need thereof immune effector cells (e.g., T cells, NK cells) that are engineered to express a NCAMCAR, wherein the cancer cells express NCAM. In one embodiment, the cancer to be treated is neuroblastoma, or other solid tumors.

[0712] In one aspect, the present disclosure provides methods of treating cancer by providing to the subject in need thereof immune effector cells (e.g., T cells, NK cells) that are engineered to express a CAIXCAR, wherein the cancer cells express CAIX. In one embodiment, the cancer to be treated is renal cancer, CRC, cervical cancer, or other solid tumors.

[0713] In one aspect, the present disclosure provides methods of treating cancer by providing to the subject in need thereof immune effector cells (e.g., T cells, NK cells) that are engineered to express a HMWMAACAR, wherein the cancer cells express HMWMAA. In one embodiment, the cancer to be treated is melanoma, glioblastoma, or breast cancer.

[0714] In one aspect, the present disclosure provides methods of treating cancer by providing to the subject in need thereof immune effector cells (e.g., T cells, NK cells) that are engineered to express an o-acetyl-GD2CAR, wherein the cancer cells express o-acetyl-GD2. In one embodiment, the cancer to be treated is neuroblastoma, or melanoma.

[0715] In one aspect, the present disclosure provides methods of treating cancer by providing to the subject in need thereof immune effector cells (e.g., T cells, NK cells) that are engineered to express a CLDN6CAR, wherein the cancer cells express CLDN6. In one embodiment, the cancer to be treated is ovarian cancer, lung cancer, or breast cancer.

[0716] In one aspect, the present disclosure provides methods of treating cancer by providing to the subject in need thereof immune effector cells (e.g., T cells, NK cells) that are engineered to express a TSHRCAR, wherein the cancer cells express TSHR. In one embodiment, the cancer to be treated is thyroid cancer, or multiple myeloma.

[0717] In one aspect, the present disclosure provides methods of treating cancer by providing to the subject in need thereof immune effector cells (e.g., T cells, NK cells) that are engineered to express a CD97CAR, wherein the cancer cells express CD97. In one embodiment, the cancer to be treated is B cell malignancies, gastric cancer, pancreatic cancer, esophageal cancer, glioblastoma, breast cancer, or colorectal cancer.

[0718] In one aspect, the present disclosure provides methods of treating cancer by providing to the subject in need thereof immune effector cells (e.g., T cells, NK cells) that are engineered to express a Plysialic acid CAR, wherein the cancer cells express Plysialic acid. In one embodiment, the cancer to be treated is small cell lung cancer.

[0719] In one aspect, the present disclosure provides methods of treating cancer by providing to the subject in need thereof immune effector cells (e.g., T cells, NK cells) that are engineered to express a PLAC1CAR, wherein the cancer cells express PLAC1. In one embodiment, the cancer to be treated is HCC (hepatocellular carcinoma).

[0720] In one aspect, the present disclosure provides methods of treating cancer by providing to the subject in need thereof immune effector cells (e.g., T cells, NK cells) that are engineered to express a GloboHCAR, wherein the cancer cells express GloboH. In one embodiment, the cancer to be treated is ovarian cancer, gastric cancer, prostate cancer, lung cancer, breast cancer, or pancreatic cancer.

[0721] In one aspect, the present disclosure provides methods of treating cancer by providing to the subject in need thereof immune effector cells (e.g., T cells, NK cells) that are engineered to express a NY-BR-1CAR, wherein the cancer cells express NY-BR-1. In one embodiment, the cancer to be treated is breast cancer.

[0722] In one aspect, the present disclosure provides methods of treating cancer by providing to the subject in need thereof immune effector cells (e.g., T cells, NK cells) that are engineered to express a MAD-CT-1CAR, wherein the cancer cells express MAD-CT-1. In one embodiment, the cancer to be treated is prostate cancer, or melanoma.

[0723] In one aspect, the present disclosure provides methods of treating cancer by providing to the subject in need thereof immune effector cells (e.g., T cells, NK cells) that are engineered to express a MAD-CT-2CAR, wherein the cancer cells express MAD-CT-2. In one embodiment, the cancer to be treated is prostate cancer, melanoma.

[0724] In one aspect, the present disclosure provides methods of treating cancer by providing to the subject in need thereof immune effector cells (e.g., T cells, NK cells) that are engineered to express a Fos-related antigen 1 CAR, wherein the cancer cells express Fos-related antigen 1. In one embodiment, the cancer to be treated is glioma, squamous cell cancer, or pancreatic cancer.

[0725] In one aspect, the present disclosure provides methods of treating cancer by providing to the subject in need thereof immune effector cells (e.g., T cells, NK cells) that are engineered to express a ML-IAP CAR, wherein the cancer cells express ML-IAP. In one embodiment, the cancer to be treated is melanoma.

[0726] In one aspect, the present disclosure provides methods of treating cancer by providing to the subject in need thereof immune effector cells (e.g., T cells, NK cells) that are engineered to express a NA17CAR, wherein the cancer cells express NA17. In one embodiment, the cancer to be treated is melanoma.

[0727] In one aspect, the present disclosure provides methods of treating cancer by providing to the subject in need thereof immune effector cells (e.g., T cells, NK cells) that are engineered to express a TRP-2CAR, wherein the cancer cells express TRP-2. In one embodiment, the cancer to be treated is melanoma.

[0728] In one aspect, the present disclosure provides methods of treating cancer by providing to the subject in need thereof immune effector cells (e.g., T cells, NK cells) that are engineered to express a CYP1B1CAR, wherein the cancer cells express CYP1B1. In one embodiment, the cancer to be treated is breast cancer, colon cancer, lung cancer, esophagus cancer, skin cancer, lymph node cancer, brain cancer, or testis cancer.

[0729] In one aspect, the present disclosure provides methods of treating cancer by providing to the subject in need thereof immune effector cells (e.g., T cells, NK cells) that are engineered to express a RAGE-1CAR, wherein the cancer cells express RAGE-1. In one embodiment, the cancer to be treated is RCC (renal cell cancer), or other solid tumors

[0730] In one aspect, the present disclosure provides methods of treating cancer by providing to the subject in need thereof immune effector cells (e.g., T cells, NK cells) that are engineered to express a human telomerase reverse transcriptaseCAR, wherein the cancer cells express human telomerase reverse transcriptase. In one embodiment, the cancer to be treated is solid tumors.

[0731] In one aspect, the present disclosure provides methods of treating cancer by providing to the subject in need thereof immune effector cells (e.g., T cells, NK cells) that are engineered to express an intestinal carboxyl esteraseCAR, wherein the cancer cells express intestinal carboxyl esterase. In one embodiment, the cancer to be treated is thyroid cancer, RCC, CRC (colorectal cancer), breast cancer, or other solid tumors.

[0732] In one aspect, the present disclosure provides methods of treating cancer by providing to the subject in need thereof immune effector cells (e.g., T cells, NK cells) that are engineered to express a mut hsp70-2CAR, wherein the cancer cells express mut hsp70-2. In one embodiment, the cancer to be treated is melanoma.

### Combination Therapies

[0733] A CAR-expressing cell described herein may be used in combination with an inhibitor of a pro-M2 macrophage molecule, e.g., described herein. The combination of the CAR-expressing cell and the inhibitor of a pro-M2 macrophage molecule can be used in further combination with other known agents and therapies (additional therapeutic agent). Administered “in combination”, as used herein, means that two (or more) different treatments are delivered to the subject during the course of the subject's affliction with the disorder, e.g., the two or more treatments are delivered after the subject has been diagnosed with the disorder and before the disorder has been cured or eliminated or treatment has ceased for other reasons. In some embodiments, the delivery of one treatment is still occurring when the delivery of the second begins, so that there is overlap in terms of administration. This is sometimes referred to herein as “simultaneous” or “concurrent delivery”. In other embodiments, the delivery of one treatment ends before the delivery of the other treatment begins. In some embodiments of either case, the treatment is more effective because of combined administration. For example, the second treatment is more effective, e.g., an equivalent effect is seen with less of the second treatment, or the second treatment reduces symptoms to a greater extent, than would be seen if the second treatment were administered in the absence of the first treatment, or the analogous situation is seen with the first treatment. In some embodiments, delivery is such that the reduction in a symptom, or other parameter related to the disorder is greater than what would be observed with one treatment delivered in the absence of the other. The effect of the two treatments can be partially additive, wholly additive, or greater than additive. The delivery can be such that an effect of the first treatment delivered is still detectable when the second is delivered.

[0734] A CAR-expressing cell described herein and the at least one additional therapeutic agent can be administered simultaneously, in the same or in separate compositions, or sequentially. For sequential administration, the CAR-expressing cell described herein can be administered first, and the additional agent can be administered second, or the order of administration can be reversed. The inhibitor of a pro-M2 macrophage molecule can be administered before, concurrently with, or after the CAR-expressing cell or the additional agent.

[0735] The CAR therapy and/or other therapeutic agents, procedures or modalities can be administered during periods of active disorder, or during a period of remission or less active disease. The CAR therapy can be administered before the other treatment, concurrently with the treatment, post-treatment, or during remission of the disorder.

[0736] When administered in combination, the CAR therapy and the additional agent (e.g., second or third agent), or all, can be administered in an amount or dose that is higher, lower or the same than the amount or dosage of each agent used individually, e.g., as a monotherapy. In certain embodiments, the administered amount or dosage of the CAR therapy, the additional agent (e.g., second or third agent), or all, is lower (e.g., at least 20%, at least 30%, at least 40%, or at least 50%) than the amount or dosage of each agent used individually, e.g., as a monotherapy. In other embodiments, the amount or dosage of the CAR therapy, the additional agent (e.g., second or third agent), or all, that results in a desired effect (e.g., treatment of cancer) is lower (e.g., at least 20%, at least 30%, at least 40%, or at least 50% lower) than the amount or dosage of each agent used individually, e.g., as a monotherapy, required to achieve the same therapeutic effect.

### Inhibitors of a Pro-M2 Macrophage Molecule

[0737] Macrophages with the M2 phenotype are known to play a role in inhibiting T cell function, including cytotoxic function. Certain cytokines, such as IL-13, IL-4, IL-10, CSF-1, TGF-beta and GM-CSF are known to polarize macrophages to the M2 phenotype, for example (in the case of IL-13 and/or IL-4), by interaction with the IL-13Rα1 chain and/or IL-4Rα chain expressed on macrophages. Molecules that block such molecules are useful in the methods and compositions described herein. Preferred inhibitors of a pro-M2 macrophage molecule include inhibitors of IL-13, inhibitors of IL-4, inhibitors of IL-13Rα1, and/or inhibitors of IL-4Rα, e.g., as described herein.

[0738] Inhibitors of a pro-M2 macrophage molecule include, for example, small molecules. An example of a small molecule inhibitor that can be administered with a CAR-expressing cell is pterostilbene (see, e.g., Huang et al., Oncotarget. 2016 Jun. 28; 7(26): 39363-39375), which is hereby incorporated by reference in its entirety.

[0739] Inhibitors of a pro-M2 macrophage molecule include, for example, an antibody molecule, a polypeptide, e.g., a fusion protein, or an inhibitory nucleic acid, e.g., a siRNA or shRNA, or a CAR-expressing cell which binds one or more surface antigens on MDSCs or TAMs.

[0740] In one aspect, the inhibitor of a pro-M2 macrophage molecule is an anti-IL-13 antibody. Generation of such antibodies may be undertaken by methods known in the art. An example of anti-IL-13 antibodies includes, for example, lebrikizumab (see CAS number 953400-68-5). Another example of an anti-IL-13 antibody is, for example, tralokinumab (CAS number 1044515-88-9). Another example of an anti-IL-13 antibody is or comprises the anti-IL-13 binding domain of GSK2434735. Another example of an anti-IL-13 antibody is QAX576 (see, e.g., Rothenberg et al., J. Allergy Clin. Immunol., 2015, 135(2), pp. 500-507).

[0741] In another aspect, the inhibitor of a pro-M2 macrophage molecule is an anti-IL-4 antibody or anti-IL-4Rα antibody. Generation of such antibodies may be undertaken by methods known in the art. An example of anti-IL-4 antibodies includes, for example, the anti-IL-4 binding domain of GSK2434735. Another example of an anti-IL-4 antibody is, for example, dupilumab (see CAS number 1190264-60-8).

[0742] In another embodiment, the inhibitor of a pro-M2 macrophage is an inhibitor of IL-13 and/or IL-4. An example of an inhibitor of IL-13 and IL-4 that can be administered with a CAR-expressing cell is the vitamin A derivative Fenretinide ((e.g., 4-HPR) see, e.g., Dong et al. Cancer Letters. Mar. 1, 2017. Volume 388, Pages 43-53, which is hereby incorporated by reference in its entirety).

[0743] In another aspect, the inhibitor of a pro-M2 macrophage molecule is an anti-CSF-1 antibody or small molecule inhibitor of CSF-1. Generation of such antibodies may be undertaken by methods known in the art. An example of an anti-CSF-1 antibody is emactuzumab. Another example of a CSF-1 inhibitor is BLZ945 (see, e.g., Strachan, D C et al., Oncoimmunology, 2013 Dec. 1, 2(12): e26968). Another example of an inhibitor of CSF-1 that can be administered with a CAR-expressing cell is nintedanib (see, e.g., Tandon et al. American Journal of Respiratory and Critical Care Medicine 2017; 195:A2397, which is hereby incorporated by reference in its entirety).

[0744] In another aspect, the inhibitor of a pro-M2 macrophage molecule is a CAR-expressing cell which binds an antigen expressed on the surface of a MDSC or TAM (i.e., a TAM antigen), e.g., an antigen that is upregulated on the surface of a MDSCs or TAM, relative to other macrophages. In embodiments, the CAR-expressing cell which binds a MDSCs or TAM antigen binds to CD123 (e.g., is a CD123 CAR as described herein). In embodiments, the CAR-expressing cell which binds a MDSCs or TAM antigen binds to CSF1R. In embodiments, the CAR-expressing cell which binds a MDSCs or TAM antigen binds to CD68. In embodiments, the CAR-expressing cell which binds a MDSCs or TAM antigen binds to CD206.

[0745] In another embodiment, the inhibitor of a pro-M2 macrophage is a JAK2 inhibitor. An example of a JAK2 inhibitor that can be administered with a CAR-expressing cell is Ruxolitinib (see, e.g., Chen et al. Clinical Lymphoma, Myeloma and Leukemia, Volume 17, Issue 1, e93, 2017, which is hereby incorporated by reference in its entirety).

[0746] In another embodiment, the inhibitor of a pro-M2 macrophage molecule is a cell surface molecule. An example of a cell surface molecule that can be administered with a CAR-expressing cell is Dipeptidyl peptidase 4 (DPP-4) or CD26 (see, e.g., Zhuge et al. Diabetes 2016 October; 65(10): 2966-2979, which is hereby incorporated by reference in its entirety).

[0747] In another embodiment, the inhibitor of a pro-M2 macrophage molecule is an HDAC inhibitor. An example of an HDAC inhibitor that can be administered with a CAR-expressing cell is suberanilohydroxamic acid (SAHA).

[0748] In another embodiment, the inhibitor of a pro-M2 macrophage molecule is an inhibitor of the glycolytic pathway. An example of an inhibitor of the glycolytic pathway that can be administered with a CAR-expressing cell is 2-deoxy-d-glucose ((2-DG) see, e.g., Zanganeh, Nat Nanotechnol. 2016 November; 11(11): 986-994, which is hereby incorporated by reference in its entirety).

[0749] In another embodiment, the inhibitor of a pro-M2 macrophage molecule is a mitochondria-targeted antioxidant. An example of a mitochondria-targeted antioxidant that can be administered with a CAR-expressing cell is MitoQ (Formentini et al., Cell Reports, Volume 19, Issue 6, 9 May 2017, Pages 1202-1213, which is hereby incorporated by reference in its entirety).

[0750] In another embodiment, the inhibitor of a pro-M2 macrophage molecule is an iron oxide. An example of an iron oxide that can be administered with a CAR-expressing cell is ferumoxytol (see, e.g., Zanganeh, Nat Nanotechnol. 2016 November; 11(11): 986-994, which is hereby incorporated by reference in its entirety).

[0751] In embodiments, the invention includes a composition comprising an inhibitor of a pro-M2 macrophage molecule, and a pharmaceutically acceptable carrier.

### Further Combination Therapies

[0752] In further aspects, a CAR-expressing cell described herein may be used in a treatment regimen in combination with surgery, cytokines, radiation, or chemotherapy such as cytoxan, fludarabine, histone deacetylase inhibitors, demethylating agents, or peptide vaccine, such as that described in Izumoto et al. 2008 J Neurosurg 108:963-971.

[0753] In certain instances, compounds of the present invention are combined with other therapeutic agents, such as other anti-cancer agents, anti-allergic agents, anti-nausea agents (or anti-emetics), pain relievers, cytoprotective agents, and combinations thereof.

[0754] In one embodiment, a CAR-expressing cell and/or the inhibitor of a pro-M2 macrophage molecule, e.g., described herein, can be used further in combination with a chemotherapeutic agent. Exemplary chemotherapeutic agents include an anthracycline (e.g., doxorubicin (e.g., liposomal doxorubicin)). a vinca alkaloid (e.g., vinblastine, vincristine, vindesine, vinorelbine), an alkylating agent (e.g., cyclophosphamide, decarbazine, melphalan, ifosfamide, temozolomide), an immune cell antibody (e.g., alemtuzamab, gemtuzumab, rituximab, ofatumumab, tositumomab, brentuximab), an antimetabolite (including, e.g., folic acid antagonists, pyrimidine analogs, purine analogs and adenosine deaminase inhibitors (e.g., fludarabine)), an mTOR inhibitor, a TNFR glucocorticoid induced TNFR related protein (GITR) agonist, a proteasome inhibitor (e.g., aclacinomycin A, gliotoxin or bortezomib), an immunomodulator such as thalidomide or a thalidomide derivative (e.g., lenalidomide).

[0755] General Chemotherapeutic agents considered for use in combination therapies include anastrozole (Arimidex®), bicalutamide (Casodex®), bleomycin sulfate (Blenoxane®), busulfan (Myleran®), busulfan injection (Busulfex®), capecitabine (Xeloda®), N4-pentoxycarbonyl-5-deoxy-5-fluorocytidine, carboplatin (Paraplatin®), carmustine (BiCNU®), chlorambucil (Leukeran®), cisplatin (Platinol®), cladribine (Leustatin®), cyclophosphamide (Cytoxan® or Neosar®), cytarabine, cytosine arabinoside (Cytosar-U®), cytarabine liposome injection (DepoCyt®), dacarbazine (DTIC-Dome®), dactinomycin (Actinomycin D, Cosmegan), daunorubicin hydrochloride (Cerubidine®), daunorubicin citrate liposome injection (DaunoXome®), dexamethasone, docetaxel (Taxotere®), doxorubicin hydrochloride (Adriamycin®, Rubex®), etoposide (Vepesid®), fludarabine phosphate (Fludara®), 5-fluorouracil (Adrucil®, Efudex®), flutamide (Eulexin®), tezacitibine, Gemcitabine (difluorodeoxycitidine), hydroxyurea (Hydrea®), Idarubicin (Idamycin®), ifosfamide (IFEX®), irinotecan (Camptosar®), L-asparaginase (ELSPAR®), leucovorin calcium, melphalan (Alkeran®), 6-mercaptopurine (Purinethol®), methotrexate (Folex®), mitoxantrone (Novantrone®), mylotarg, paclitaxel (Taxol®), phoenix (Yttrium90/MX-DTPA), pentostatin, polifeprosan 20 with carmustine implant (Gliadel®), tamoxifen citrate (Nolvadex®), teniposide (Vumon®), 6-thioguanine, thiotepa, tirapazamine (Tirazone®), topotecan hydrochloride for injection (Hycamptin®), vinblastine (Velban®), vincristine (Oncovin®), and vinorelbine (Navelbine®).

[0756] Anti-cancer agents of particular interest for the combinations disclosed herein include: anthracyclines; alkylating agents; antimetabolites; drugs that inhibit either the calcium dependent phosphatase calcineurin or the p70S6 kinase FK506) or inhibit the p70S6 kinase; mTOR inhibitors; immunomodulators; anthracyclines; vinca alkaloids; proteosome inhibitors; GITR agonists; protein tyrosine phosphatase inhibitors; a CDK4 kinase inhibitor; a BTK inhibitor; a MKN kinase inhibitor; a DGK kinase inhibitor; or an oncolytic virus.

[0757] Exemplary antimetabolites include, without limitation, pyrimidine analogs, purine analogs and adenosine deaminase inhibitors): methotrexate (Rheumatrex®, Trexall®), 5-fluorouracil (Adrucil®, Efudex®, Fluoroplex®), floxuridine (FUDF®), cytarabine (Cytosar-U®, Tarabine PFS), 6-mercaptopurine (Puri-Nethol®)), 6-thioguanine (Thioguanine Tabloid®), fludarabine phosphate (Fludara®), pentostatin (Nipent®), pemetrexed (Alimta®), raltitrexed (Tomudex®), cladribine (Leustatin®), clofarabine (Clofarex®, Clolar®), azacitidine (Vidaza®), decitabine and gemcitabine (Gemzar®). Preferred antimetabolites include, cytarabine, clofarabine and fludarabine.

[0758] Exemplary alkylating agents include, without limitation, nitrogen mustards, ethylenimine derivatives, alkyl sulfonates, nitrosoureas and triazenes): uracil mustard (Aminouracil Mustard®, Chlorethaminacil®, Demethyldopan®, Desmethyldopan®, Haemanthamine®, Nordopan®, Uracil Nitrogen Mustard®, Uracillost®, Uracilmostaza®, Uramustin®, Uramustine®), chlormethine (Mustargen®), cyclophosphamide (Cytoxan®, Neosar®, Clafen®, Endoxan®, Procytox®, Revimmune™), ifosfamide (Mitoxana®), melphalan (Alkeran®), Chlorambucil (Leukeran®), pipobroman (Amedel®, Vercyte®), triethylenemelamine (Hemel®, Hexalen®, Hexastat®), triethylenethiophosphoramine, Temozolomide (Temodar®), thiotepa (Thioplex®), busulfan (Busilvex®, Myleran®), carmustine (BiCNU®), lomustine (CeeNU®), streptozocin (Zanosar®), and Dacarbazine (DTIC-Dome®). Additional exemplary alkylating agents include, without limitation, Oxaliplatin (Eloxatin®); Temozolomide (Temodar® and Temodal®); Dactinomycin (also known as actinomycin-D, Cosmegen®); Melphalan (also known as L-PAM, L-sarcolysin, and phenylalanine mustard, Alkeran®); Altretamine (also known as hexamethylmelamine (HMM), Hexalen®); Carmustine (BiCNU®); Bendamustine (Treanda®); Busulfan (Busulfex® and Myleran®); Carboplatin (Paraplatin®); Lomustine (also known as CCNU, CeeNU®); Cisplatin (also known as CDDP, Platinol® and Platinol®-AQ); Chlorambucil (Leukeran®); Cyclophosphamide (Cytoxan® and Neosar®); Dacarbazine (also known as DTIC, DIC and imidazole carboxamide, DTIC-Dome®); Altretamine (also known as hexamethylmelamine (HMM), Hexalen®); Ifosfamide (Ifex®); Prednumustine; Procarbazine (Matulane®); Mechlorethamine (also known as nitrogen mustard, mustine and mechloroethamine hydrochloride, Mustargen®); Streptozocin (Zanosar®); Thiotepa (also known as thiophosphoamide, TESPA and TSPA, Thioplex®); Cyclophosphamide (Endoxan®, Cytoxan®, Neosar®, Procytox®, Revimmune®); and Bendamustine HCl (Treanda®).

[0759] In embodiments, a CAR-expressing cell described herein, optionally in combination with an inhibitor of a pro-M2 macrophage molecule, is administered to a subject in combination with a BTK inhibitor. Inhibitors of BTK include a small molecule, an antibody molecule, a polypeptide, e.g., a fusion protein, or an inhibitory nucleic acid, e.g., a siRNA or shRNA.

[0760] In one embodiment, the kinase inhibitor is a BTK inhibitor selected from ibrutinib (PCI-32765); GDC-0834; RN-486; CGI-560; CGI-1764; HM-71224; CC-292; ONO-4059; CNX-774; and LFM-A13. In a preferred embodiment, the BTK inhibitor does not reduce or inhibit the kinase activity of interleukin-2-inducible kinase (ITK), and is selected from GDC-0834; RN-486; CGI-560; CGI-1764; HM-71224; CC-292; ONO-4059; CNX-774; and LFM-A13.

[0761] In one embodiment, the kinase inhibitor is a BTK inhibitor, e.g., ibrutinib (PCI-32765). In embodiments, a CAR-expressing cell described herein is administered to a subject in combination with a BTK inhibitor (e.g., ibrutinib). In embodiments, a CAR-expressing cell described herein is administered to a subject in combination with ibrutinib (also called PCI-32765). The chemical name of ibrutinib is as follows: 1-[(3R)-3-[4-Amino-3-(4-phenoxyphenyl)-1H-pyrazolo[3,4-d]pyrimidin-1-yl]piperidin-1-yl]prop-2-en-1-one).

In some embodiments the BTK inhibitor is a BTK inhibitor described in International Application WO/2015/079417, which is herein incorporated by reference in its entirety.

[0762] In embodiments, a CAR-expressing cell described herein, optionally in combination with an inhibitor of a pro-M2 macrophage molecule, is administered to a subject in combination with a phosphoinositide 3-kinase (PI3K) inhibitor (e.g., a PI3K inhibitor described herein, e.g., idelalisib or duvelisib) and/or rituximab. In embodiments, a CAR-expressing cell described herein is administered to a subject in combination with idelalisib and rituximab. In embodiments, a CAR-expressing cell described herein is administered to a subject in combination with duvelisib and rituximab. Idelalisib (also called GS-1101 or CAL-101; Gilead) is a small molecule that blocks the delta isoform of PI3K. The chemical name of idelalisib is 5-Fluoro-3-phenyl-2-[(1S)-1-(7H-purin-6-ylamino)propyl]-4(3H)-quinazolinone. Duvelisib is a small molecule that blocks PI3K-δ,γ. The chemical name of duvelisib is 8-Chloro-2-phenyl-3-[(1S)-1-(9H-purin-6-ylamino)ethyl]-1(2H)-isoquinolinone).

In some embodiments, a CAR-expressing cell is administered to a subject in combination with a phosphoinositide 3-kinase (PI3K) inhibitor. In certain embodiments, the PI3K inhibitor is tenalisib (RP6530) see, e.g., Locatell et al., Blood. Jul. 7, 2016; 128 (1), which is incorporated herein by reference in its entirety).

[0763] In embodiments, the subject has CLL. In embodiments, the subject has relapsed CLL, e.g., the subject has previously been administered a cancer therapy (e.g., previously been administered an anti-CD20 antibody or previously been administered ibrutinib). For example, the subject has a deletion in the short arm of chromosome 17 (del(17p), e.g., in a leukemic cell). In other examples, the subject does not have a del(17p). In embodiments, the subject comprises a leukemic cell comprising a mutation in the immunoglobulin heavy-chain variable-region (IgV_{H}) gene. In other embodiments, the subject does not comprise a leukemic cell comprising a mutation in the immunoglobulin heavy-chain variable-region (IgV_{H}) gene. In embodiments, the subject has a deletion in the long arm of chromosome 11 (del(11q)). In other embodiments, the subject does not have a del(11q). In embodiments, idelalisib is administered at a dosage of about 100-400 mg (e.g., 100-125, 125-150, 150-175, 175-200, 200-225, 225-250, 250-275, 275-300, 325-350, 350-375, or 375-400 mg), e.g., BID. In embodiments, duvelisib is administered at a dosage of about 15-100 mg (e.g., about 15-25, 25-50, 50-75, or 75-100 mg), e.g., twice a day. In embodiments, rituximab is administered at a dosage of about 350-550 mg/m² (e.g., 350-375, 375-400, 400-425, 425-450, 450-475, or 475-500 mg/m²), e.g., intravenously.

[0764] In embodiments, a CAR-expressing cell described herein, optionally in combination with an inhibitor of a pro-M2 macrophage molecule, is administered to a subject in combination with an anaplastic lymphoma kinase (ALK) inhibitor. Exemplary ALK kinase inhibitors include but are not limited to crizotinib (Pfizer), ceritinib (Novartis), alectinib (Chugai), brigatinib (also called AP26113; Ariad), entrectinib (Ignyta), PF-06463922 (Pfizer), TSR-011 (Tesaro) (see, e.g., Clinical Trial Identifier No. NCT02048488), CEP-37440 (Teva), and X-396 (Xcovery). In some embodiments, the subject has a solid cancer, e.g., a solid cancer described herein, e.g., lung cancer.

[0765] The chemical name of crizotinib is 3-[(1R)-1-(2,6-dichloro-3-fluorophenyl)ethoxy]-5-(1-piperidin-4-ylpyrazol-4-yl)pyridin-2-amine. The chemical name of ceritinib is 5-Chloro-N²-[2-isopropoxy-5-methyl-4-(4-piperidinyl)phenyl]-N⁴-[2-(isopropylsulfonyl)phenyl]-2,4-pyrimidinediamine. The chemical name of alectinib is 9-ethyl-6,6-dimethyl-8-(4-morpholinopiperidin-1-yl)-11-oxo-6,11-dihydro-5H-benzo[b]carbazole-3-carbonitrile. The chemical name of brigatinib is 5-Chloro-N²-{4-[4-(dimethylamino)-1-piperidinyl]-2-methoxyphenyl}-N⁴-[2-(dimethylphosphoryl)phenyl]-2,4-pyrimidinediamine. The chemical name of entrectinib is N-(5-(3,5-difluorobenzyl)-1H-indazol-3-yl)-4-(4-methylpiperazin-1-yl)-2-((tetrahydro-2H-pyran-4-yl)amino)benzamide. The chemical name of PF-06463922 is (10R)-7-Amino-12-fluoro-2,10,16-trimethyl-15-oxo-10,15,16,17-tetrahydro-2H-8,4-(metheno)pyrazolo[4,3-h][2,5,11]-benzoxadiazacyclotetradecine-3-carbonitrile. The chemical structure of CEP-37440 is (S)-2-((5-chloro-2-((6-(4-(2-hydroxyethyl)piperazin-1-yl)-1-methoxy-6,7,8,9-tetrahydro-5H-benzo[7]annulen-2-yl)amino)pyrimidin-4-yl)amino)-N-methylbenzamide. The chemical name of X-396 is (R)-6-amino-5-(1-(2,6-dichloro-3-fluorophenyl)ethoxy)-N-(4-(4-methylpiperazine-1-carbonyl)phenyl)pyridazine-3-carboxamide.

[0766] In embodiments, a CAR-expressing cell described herein, optinally in combination with an inhibitor of a pro-M2 macrophage molecule, is administered to a subject in combination with an indoleamine 2,3-dioxygenase (IDO) inhibitor. IDO is an enzyme that catalyzes the degradation of the amino acid, L-tryptophan, to kynurenine. Many cancers overexpress IDO, e.g., prostatic, colorectal, pancreatic, cervical, gastric, ovarian, head, and lung cancer. pDCs, macrophages, and dendritic cells (DCs) can express IDO. Without being bound by theory, it is thought that a decrease in L-tryptophan (e.g., catalyzed by IDO) results in an immunosuppressive milieu by inducing T-cell anergy and apoptosis. Thus, without being bound by theory, it is thought that an IDO inhibitor can enhance the efficacy of a CAR-expressing cell described herein, e.g., by decreasing the suppression or death of a CAR-expressing immune cell. In embodiments, the subject has a solid tumor, e.g., a solid tumor described herein, e.g., prostatic, colorectal, pancreatic, cervical, gastric, ovarian, head, or lung cancer. Exemplary inhibitors of IDO include but are not limited to 1-methyl-tryptophan, indoximod (NewLink Genetics) (see, e.g., Clinical Trial Identifier Nos. NCT01191216; NCT01792050), and INCB024360 (Incyte Corp.) (see, e.g., Clinical Trial Identifier Nos. NCT01604889; NCT01685255).

[0767] In embodiments, a CAR-expressing cell described herein, optionally in combination with an inhibitor of a pro-M2 macrophage molecule, is administered to a subject in combination with a modulator of myeloid-derived suppressor cells (MDSCs). MDSCs accumulate in the periphery and at the tumor site of many solid tumors. These cells suppress T cell responses, thereby hindering the efficacy of CAR-expressing cell therapy. Without being bound by theory, it is thought that administration of a MDSC modulator enhances the efficacy of a CAR-expressing cell described herein. In an embodiment, the subject has a solid tumor, e.g., a solid tumor described herein, e.g., glioblastoma. Exemplary modulators of MDSCs include but are not limited to MCS110 and BLZ945. MCS110 is a monoclonal antibody (mAb) against macrophage colony-stimulating factor (M-CSF). See, e.g., Clinical Trial Identifier No. NCT00757757 and WO2005/068503. BLZ945 is a small molecule inhibitor of colony stimulating factor 1 receptor (CSF1R). See, e.g., Pyonteck et al. Nat. Med. 19(2013):1264-72. In embodiments the CAR targets mesothelin, e.g., comprises a mesothelin binding domain described herein, e.g., is a CAR of Table 11, e.g., is M5. In embodiments the CAR targets EGFRvIII, e.g., comprises a EGFRvIII binding domain described herein, e.g., is a CAR of Table 30. The structure of BLZ945 is shown below.

[chemical structure]

[0768] In some embodiments, a CAR-expressing cell described herein, optionally in combination with an inhibitor of a pro-M2 macrophage molecule, is administered to a subject in combination with a interleukin-15 (IL-15) polypeptide, a interleukin-15 receptor alpha (IL-15Ra) polypeptide, or a combination of both a IL-15 polypeptide and a IL-15Ra polypeptide e.g., hetIL-15 (Admune Therapeutics, LLC). hetIL-15 is a heterodimeric non-covalent complex of IL-15 and IL-15Ra. hetIL-15 is described in, e.g., U.S. Pat. No. 8,124,084, U.S. 2012/0177598, U.S. 2009/0082299, U.S. 2012/0141413, and U.S. 2011/0081311, incorporated herein by reference. In embodiments, het-IL-15 is administered subcutaneously. In embodiments, the subject has a cancer, e.g., solid cancer, e.g., melanoma or colon cancer. In embodiments, the subject has a metastatic cancer.

[0769] In some embodiments, a CAR-expressing cell described herein, optionally in combination with an inhibitor of a pro-M2 macrophage molecule, is administered to a subject in combination with an oncolytic virus. In embodiments, the oncolytic virus is Talimogene laherparepvec. In embodiments, the oncolytic virus is engineered to secrete one or more cytokines, e.g., In embodiments, the oncolytic virus is Ad5-CMV-TNFα; In embodiments, the oncolytic virus is Ad5-CMV-IL2; In embodiments, the oncolytic virus is Ad5-CMV-IFNg; In embodiments, the oncolytic virus is Ad5-CMV-IFNb; or combinations thereof. In embodiments, the oncolytic virus is as described in WO2014/170389, which is incorporated herein by reference in its entirety, and is used in combination with a CAR-expressing cell, e.g., a CAR-expressing cell described herein, e.g., a mesoCAR-expressing cell, e.g., as described herein. In embodiments, the oncolytic virus is described in US2010/0178684 A1, which is incorporated herein by reference in its entirety. In some embodiments, a recombinant oncolytic virus comprises a nucleic acid sequence (e.g., heterologous nucleic acid sequence) encoding an inhibitor of an immune or inflammatory response, e.g., as described in US2010/0178684 A1, incorporated herein by reference in its entirety. In embodiments, the recombinant oncolytic virus, e.g., oncolytic NDV, comprises a pro-apoptotic protein (e.g., apoptin), a cytokine (e.g., GM-CSF, interferon-gamma, interleukin-2 (IL-2), tumor necrosis factor-alpha), an immunoglobulin (e.g., an antibody against ED-B firbonectin), tumor associated antigen, a bispecific adapter protein (e.g., bispecific antibody or antibody fragment directed against NDV HN protein and a T cell co-stimulatory receptor, such as CD3 or CD28; or fusion protein between human IL-2 and single chain antibody directed against NDV HN protein). See, e.g., Zamarin et al. Future Microbiol. 7.3(2012):347-67, incorporated herein by reference in its entirety. In some embodiments, the oncolytic virus is a chimeric oncolytic NDV described in U.S. Pat. No. 8,591,881 B2, US 2012/0122185 A1, or US 2014/0271677 A1, each of which is incorporated herein by reference in their entireties. In some embodiments, the oncolytic virus comprises a conditionally replicative adenovirus (CRAd), which is designed to replicate exclusively in cancer cells. See, e.g., Alemany et al. Nature Biotechnol. 18(2000):723-27. In some embodiments, an oncolytic adenovirus comprises one described in Table 1 on page 725 of Alemany et al., incorporated herein by reference in its entirety.

[0770] Exemplary oncolytic viruses include but are not limited to the following:

[0771] Group B Oncolytic Adenovirus (ColoAdl) (PsiOxus Therapeutics Ltd.) (see, e.g., Clinical Trial Identifier: NCT02053220);

[0772] ONCOS-102 (previously called CGTG-102), which is an adenovirus comprising granulocyte-macrophage colony stimulating factor (GM-CSF) (Oncos Therapeutics) (see, e.g., Clinical Trial Identifier: NCT01598129);

[0773] VCN-01, which is a genetically modified oncolytic human adenovirus encoding human PH20 hyaluronidase (VCN Biosciences, S.L.) (see, e.g., Clinical Trial Identifiers: NCT02045602 and NCT02045589);

[0774] Conditionally Replicative Adenovirus ICOVIR-5, which is a virus derived from wild-type human adenovirus serotype 5 (Had5) that has been modified to selectively replicate in cancer cells with a deregulated retinoblastoma/E2F pathway (Institut Català d'Oncologia) (see, e.g., Clinical Trial Identifier: NCT01864759);

[0775] Celyvir, which comprises bone marrow-derived autologous mesenchymal stem cells (MSCs) infected with ICOVIR5, an oncolytic adenovirus (Hospital Infantil Universitario Niño Jesús, Madrid, Spain/Ramon Alemany) (see, e.g., Clinical Trial Identifier: NCT01844661);

[0776] CG0070, which is a conditionally replicating oncolytic serotype 5 adenovirus (Ad5) in which human E2F-1 promoter drives expression of the essential Ela viral genes, thereby restricting viral replication and cytotoxicity to Rb pathway-defective tumor cells (Cold Genesys, Inc.) (see, e.g., Clinical Trial Identifier: NCT02143804); or

[0777] DNX-2401 (formerly named Delta-24-RGD), which is an adenovirus that has been engineered to replicate selectively in retinoblastoma (Rb)-pathway deficient cells and to infect cells that express certain RGD-binding integrins more efficiently (Clinica Universidad de Navarra, Universidad de Navarra/DNAtrix, Inc.) (see, e.g., Clinical Trial Identifier: NCT01956734). In any of the embodiments incorporating an oncolytic virus, in an aspect, the CAR targets mesothelin, e.g., comprises a mesothelin binding domain described herein, e.g., is a CAR of Table 11, e.g., is M5. In any of the embodiments incorporating an oncolytic virus, in an aspect, the CAR targets EGFRvIII, e.g., comprises a EGFRvIII binding domain described herein, e.g., is a CAR of Table 30.

[0778] In some embodiments, a CAR-expressing cell described herein, optionally in combination with an inhibitor of a pro-M2 macrophage molecule, is administered to a subject in combination with human hyaluronidase, e.g., recombinant human hyaluronidase, e.g., is PEGPH20. See e.g., Clinical Trial Id. NCT02715804. In embodiments the CAR targets mesothelin, e.g., comprises a mesothelin binding domain described herein, e.g., is a CAR of Table 11, e.g., is M5. In embodiments the CAR targets EGFRvIII, e.g., comprises a EGFRvIII binding domain described herein, e.g., is a CAR of Table 30.

### Pharmaceutical Compositions and Treatments

[0779] Pharmaceutical compositions of the present invention may comprise a CAR-expressing cell, e.g., a plurality of CAR-expressing cells, as described herein, in combination with one or more pharmaceutically or physiologically acceptable carriers, diluents or excipients. Such compositions may comprise buffers such as neutral buffered saline, phosphate buffered saline and the like; carbohydrates such as glucose, mannose, sucrose or dextrans, mannitol; proteins; polypeptides or amino acids such as glycine; antioxidants; chelating agents such as EDTA or glutathione; adjuvants (e.g., aluminum hydroxide); and preservatives. Compositions of the present invention are in one aspect formulated for intravenous administration.

[0780] Pharmaceutical compositions of the present invention may be administered in a manner appropriate to the disease to be treated (or prevented). The quantity and frequency of administration will be determined by such factors as the condition of the patient, and the type and severity of the patient's disease, although appropriate dosages may be determined by clinical trials.

[0781] In one embodiment, the pharmaceutical composition is substantially free of, e.g., there are no detectable levels of a contaminant, e.g., selected from the group consisting of endotoxin, mycoplasma, replication competent lentivirus (RCL), p24, VSV-G nucleic acid, HIV gag, residual anti-CD3/anti-CD28 coated beads, mouse antibodies, pooled human serum, bovine serum albumin, bovine serum, culture media components, vector packaging cell or plasmid components, a bacterium and a fungus. In one embodiment, the bacterium is at least one selected from the group consisting of Alcaligenes faecalis, Candida albicans, Escherichia coli, Haemophilus influenza, Neisseria meningitides, Pseudomonas aeruginosa, Staphylococcus aureus, Streptococcus pneumonia, and Streptococcus pyogenes group A.

[0782] When “an immunologically effective amount,” “an anti-tumor effective amount,” “a tumor-inhibiting effective amount,” or “therapeutic amount” is indicated, the precise amount of the compositions of the present invention to be administered can be determined by a physician with consideration of individual differences in age, weight, tumor size, extent of infection or metastasis, and condition of the patient (subject). It can generally be stated that a pharmaceutical composition comprising the T cells described herein may be administered at a dosage of 10⁴ to 10⁹ cells/kg body weight, in some instances 10⁵ to 10⁶ cells/kg body weight, including all integer values within those ranges. T cell compositions may also be administered multiple times at these dosages.

[0783] In some embodiments, a dose of CAR cells includes about 10⁴ to about 10⁹ cells/kg, e.g., about 10⁴ to about 10⁵ cells/kg, about 10⁵ to about 10⁶ cells/kg, about 10⁶ to about 10⁷ cells/kg, about 10⁷ to about 10⁸ cells/kg, or about 10⁸ to about 10⁹ cells/kg. In embodiments, the dose of CAR cells comprises about 0.6×10⁶ cells/kg to about 2×10⁷ cells/kg. In particular embodiments, a dose of CAR cells includes about 2×10⁵, 1×10⁶, 1.1×10⁶, 2×10⁶, 3×10⁶, 3.6×10⁶, 5×10⁶, 1×10⁷, 1.8×10⁷, 2×10⁷, 5×10⁷, 1×10⁸, 2×10⁸, 3×10⁸, or 5×10⁸ cells/kg. In some embodiments, a dose of CAR cells comprises at least about 1×10⁶, 1.1×10⁶, 2×10⁶, 3.6×10⁶, 5×10⁶, 1×10⁷, 1.8×10⁷, 2×10⁷, 5×10⁷, 1×10⁸, 2×10⁸, 3×10⁸, or 5×10⁸ cells/kg.

[0784] In some embodiments, a dose of CAR cells comprises about 1×10⁶, 1.1×10⁶, 2×10⁶, 3.6×10⁶, 5×10⁶, 1×10⁷, 1.8×10⁷, 2×10⁷, 5×10⁷, 1×10⁸, 2×10⁸, or 5×10⁸ cells/kg. In some embodiments, a dose of CAR cells comprises at least about 1×10⁶, 1.1×10⁶, 2×10⁶, 3.6×10⁶, 5×10⁶, 1×10⁷, 1.8×10⁷, 2×10⁷, 5×10⁷, 1×10⁸, 2×10⁸, or 5×10⁸ cells/kg. In some embodiments, a dose of CAR cells comprises up to about 1×10⁶, 1.1×10⁶, 2×10⁶, 3.6×10⁶, 5×10⁶, 1×10⁷, 1.8×10⁷, 2×10⁷, 5×10⁷, 1×10⁸, 2×10⁸, or 5×10⁸ cells/kg. In some embodiments, a dose of CAR cells comprises about 1.1×10⁶-1.8×10⁷ cells/kg. In some embodiments, a dose of CAR cells comprises about 1×10⁷, 2×10⁷, 5×10⁷, 1×10⁸, 2×10⁸, 5×10⁸, 1×10⁹, 2×10⁹, or 5×10⁹ cells. In some embodiments, a dose of CAR cells comprises at least about 1×10⁷, 2×10⁷, 5×10⁷, 1×10⁸, 2×10⁸, 5×10⁸, 1×10⁹, 2×10⁹, or 5×10⁹ cells. In some embodiments, a dose of CAR cells comprises up to about 1×10⁷, 2×10⁷, 5×10⁷, 1×10⁸, 2×10⁸, 5×10⁸, 1×10⁹, 2×10⁹, or 5×10⁹ cells.

[0785] The cells can be administered by using infusion techniques that are commonly known in immunotherapy (see, e.g., Rosenberg et al., New Eng. J. of Med. 319:1676, 1988).

[0786] In certain aspects, it may be desired to administer activated T cells to a subject and then subsequently redraw blood (or have an apheresis performed), activate T cells therefrom according to the present invention, and reinfuse the patient with these activated and expanded T cells. This process can be carried out multiple times every few weeks. In certain aspects, T cells can be activated from blood draws of from 10 cc to 400 cc. In certain aspects, T cells are activated from blood draws of 20 cc, 30 cc, 40 cc, 50 cc, 60 cc, 70 cc, 80 cc, 90 cc, or 100 cc.

[0787] The administration of the subject compositions may be carried out in any convenient manner, including by aerosol inhalation, injection, ingestion, transfusion, implantation or transplantation. The compositions described herein may be administered to a patient trans arterially, subcutaneously, intradermally, intratumorally, intranodally, intramedullary, intramuscularly, by intravenous (i.v.) injection, or intraperitoneally. In one aspect, the CAR-expressing cell (e.g., T cell or NK cell) compositions of the present invention are administered to a patient by intradermal or subcutaneous injection. In one aspect, the the CAR-expressing cell (e.g., T cell or NK cell) compositions of the present invention are administered by i.v. injection. The compositions of the CAR-expressing cell (e.g., T cell or NK cell) may be injected directly into a tumor, lymph node, or site of infection.

[0788] In a particular exemplary aspect, subjects may undergo leukapheresis, wherein leukocytes are collected, enriched, or depleted ex vivo to select and/or isolate the cells of interest, e.g., immune effector cells (e.g., T cells or NK cells). These immune effector cell (e.g., T cell or NK cell) isolates may be expanded by methods known in the art and treated such that one or more CAR constructs of the invention may be introduced, thereby creating a CAR-expressing cell (e.g., CAR T cell or CAR-expressing NK cell) of the invention. Subjects in need thereof may subsequently undergo standard treatment with high dose chemotherapy followed by peripheral blood stem cell transplantation. In certain aspects, following or concurrent with the transplant, subjects receive an infusion of the expanded CAR-expressing cell (e.g., CAR T cell or CAR-expressing NK cell) of the present invention. In an additional aspect, expanded cells are administered before or following surgery.

[0789] The dosage of the above treatments to be administered to a patient will vary with the precise nature of the condition being treated and the recipient of the treatment. The scaling of dosages for human administration can be performed according to art-accepted practices. The dose for CAMPATH, for example, will generally be in the range 1 to about 100 mg for an adult patient, usually administered daily for a period between 1 and 30 days. The preferred daily dose is 1 to 10 mg per day although in some instances larger doses of up to 40 mg per day may be used (described in U.S. Pat. No. 6,120,766).

[0790] In one embodiment, the CAR is introduced into immune effector cells (e.g., T cells or NK cells), e.g., using in vitro transcription, and the subject (e.g., human) receives an initial administration of a CAR-expressing cell (e.g., CAR T cell or CAR-expressing NK cell) of the invention, and one or more subsequent administrations of the CAR-expressing cell (e.g., CAR T cell or CAR-expressing NK cell) of the invention, wherein the one or more subsequent administrations are administered less than 15 days, e.g., 14, 13, 12, 11, 10, 9, 8, 7, 6, 5, 4, 3, or 2 days after the previous administration. In one embodiment, more than one administration of the CAR-expressing cell (e.g., CAR T cell or CAR-expressing NK cell) of the invention are administered to the subject (e.g., human) per week, e.g., 2, 3, or 4 administrations of the CAR-expressing cell (e.g., CAR T cell or CAR-expressing NK cell) of the invention are administered per week. In one embodiment, the subject (e.g., human subject) receives more than one administration of the CAR-expressing cell (e.g., CAR T cell or CAR-expressing NK cell) per week (e.g., 2, 3 or 4 administrations per week) (also referred to herein as a cycle), followed by a week of no CAR-expressing cell (e.g., CAR T cell or CAR-expressing NK cell) administrations, and then one or more additional administration of the CAR-expressing cell (e.g., CAR T cell or CAR-expressing NK cell) (e.g., more than one administration of the CAR-expressing cell (e.g., CAR T cell or CAR-expressing NK cell) per week) is administered to the subject. In another embodiment, the subject (e.g., human subject) receives more than one cycle of CAR-expressing cell (e.g., CAR T cell or CAR-expressing NK cell), and the time between each cycle is less than 10, 9, 8, 7, 6, 5, 4, or 3 days. In one embodiment, the CAR-expressing cell (e.g., CAR T cell or CAR-expressing NK cell) are administered every other day for 3 administrations per week. In one embodiment, the CAR-expressing cell (e.g., CAR T cell or CAR-expressing NK cell) of the invention are administered for at least two, three, four, five, six, seven, eight or more weeks.

[0791] In one aspect, CAR-expressing cell (e.g., CAR T cell or CAR-expressing NK cell) (e.g., CD123 CAR-expressing cell) is generated using lentiviral viral vectors, such as lentivirus. CAR-expressing cell (e.g., CAR T cell or CAR-expressing NK cell) generated that way will have stable CAR expression.

[0792] In one aspect, CAR-expressing cells, e.g., CARTs or CAR-expressing NK cells, are generated using a viral vector such as a gammaretroviral vector, e.g., a gammaretroviral vector described herein. CAR-expressing cells, e.g., CARTs or CAR-expressing NK cells, generated using these vectors can have stable CAR expression.

[0793] In one aspect, the CAR-expressing cell (e.g., CAR T cell or CAR-expressing NK cell) transiently express CAR vectors for 4, 5, 6, 7, 8, 9, 10, 11, 12, 13, 14, 15 days after transduction. Transient expression of CARs can be effected by RNA CAR vector delivery. In one aspect, the CAR RNA is transduced into the cell (e.g., T cell or NK cell) by electroporation.

[0794] A potential issue that can arise in patients being treated using transiently expressing CAR cell (e.g., CAR T cell or CAR-expressing NK cell) (particularly with murine scFv bearing CARs) is anaphylaxis after multiple treatments.

[0795] Without being bound by this theory, it is believed that such an anaphylactic response might be caused by a patient developing humoral anti-CAR response, i.e., anti-CAR antibodies having an anti-IgE isotype. It is thought that a patient's antibody producing cells undergo a class switch from IgG isotype (that does not cause anaphylaxis) to IgE isotype when there is a ten to fourteen day break in exposure to antigen.

[0796] If a patient is at high risk of generating an anti-CAR antibody response during the course of transient CAR therapy (such as those generated by RNA transductions), CAR-expressing cell (e.g., CAR T cell or CAR-expressing NK cell) infusion breaks should not last more than ten to fourteen days.

### EXAMPLES

[0797] The invention is further described in detail by reference to the following experimental examples. These examples are provided for purposes of illustration only, and are not intended to be limiting unless otherwise specified. Thus, the invention should in no way be construed as being limited to the following examples, but rather, should be construed to encompass any and all variations which become evident as a result of the teaching provided herein.

[0798] Without further description, it is believed that one of ordinary skill in the art can, using the preceding description and the following illustrative examples, make and utilize the compounds of the present invention and practice the claimed methods. The following working examples specifically point out various aspects of the present invention, and are not to be construed as limiting in any way the remainder of the disclosure.

### Example 1: Overcoming the Immunosuppressive Tumor Microenvironment of Hodgkin Lymphoma Using Chimeric Antigen Receptor T Cells

[0799] Despite modern treatment regimens, a subset of patients with Hodgkin lymphoma (HL) succumbs to this disease. In particular, 10-15% of patients with initially localized disease and 20-40% of patients with initially advanced stage disease will eventually relapse. Josting A, Franklin J, May M, Koch P, Beykirch M K, Heinz J, et al. New prognostic score based on treatment outcome of patients with relapsed Hodgkin's lymphoma registered in the database of the German Hodgkin's lymphoma study group. J Clin Oncol. 2002; 20:221-30. Furthermore, 10-15% of patients have disease that is refractory to first-line therapy. Santoro A, Bonadonna G, Valagussa P, Zucali R, Viviani S, Villani F, et al. Long-term results of combined chemotherapy-radiotherapy approach in Hodgkin's disease: superiority of ABVD plus radiotherapy versus MOPP plus radiotherapy. J Clin Oncol. 1987; 5:27-37. About half of patients relapsing after or refractory to first line therapy (r/r HL) can be successfully salvaged with chemotherapy followed by autologous stem cell transplantation (SCT). However, patients who fail to achieve a PET-negative status after salvage chemotherapy have a particularly poor prognosis and patients with primary refractory disease can expect an overall survival below 50%. Josting A, Franklin J, May M, Koch P, Beykirch MK, Heinz J, et al. New prognostic score based on treatment outcome of patients with relapsed Hodgkin's lymphoma registered in the database of the German Hodgkin's lymphoma study group. J Clin Oncol. 2002; 20:221-30; Josting A, Rueffer U, Franklin J, Sieber M, Diehl V, Engert A. Prognostic factors and treatment outcome in primary progressive Hodgkin lymphoma: a report from the German Hodgkin Lymphoma Study Group. Blood. 2000; 96:1280-6. Recent developments in biological therapy for r/r HL include the anti-CD30 antibody-drug conjugate brentuximab vedotin (BV). Although BV induces objective responses in 75% of patients with RR-HL after autologous SCT, responses are not durable and the median progression-free survival is 5.6 months. Younes A, Gopal A K, Smith S E, Ansell S M, Rosenblatt J D, Savage K J, et al. Results of a pivotal phase II study of brentuximab vedotin for patients with relapsed or refractory Hodgkin's lymphoma. J Clin Oncol. 2012; 30:2183-9. These patients are often young and in dire need of alternative active therapies.

[0800] HL is an immune-responsive disease, as demonstrated by the activity of allogeneic transplantation in a subset of HL patients and, more recently, by the promising clinical results of the infusion of EBV-specific T cells. Bollard C M, Gottschalk S, Torrano V, Diouf O, Ku S, Hazrat Y, et al. Sustained complete responses in patients with lymphoma receiving autologous cytotoxic T lymphocytes targeting Epstein-Barr virus latent membrane proteins. J Clin Oncol. 2014; 32:798-808. However, allogeneic transplantation carries a high treatment-related mortality and only approximately 30-40% of HL express EBV antigens. Staal S P, Ambinder R, Beschorner W E, Hayward G S, Mann R. A survey of Epstein-Barr virus DNA in lymphoid tissue. Frequent detection in Hodgkin's disease. American journal of clinical pathology. 1989; 91:1-5; Weiss L M, Movahed L A, Warnke R A, Sklar J. Detection of Epstein-Barr viral genomes in Reed-Sternberg cells of Hodgkin's disease. The New England journal of medicine. 1989; 320:502-6. Recent clinical trials indicate high response rates upon inhibition of the PD1-PDL1 axis in r/HL, leading to the FDA approval of nivolumab for this indication. Ansell S M, Lesokhin A M, Borrello I, Halwani A, Scott E C, Gutierrez M, et al. PD-1 blockade with nivolumab in relapsed or refractory Hodgkin's lymphoma. The New England journal of medicine. 2015; 372:311-9; Moskowitz C H, Ribrag V, Michot J-M, Martinelli G, Zinzani P L, Gutierrez M, et al. PD-1 Blockade with the Monoclonal Antibody Pembrolizumab (MK-3475) in Patients with Classical Hodgkin Lymphoma after Brentuximab Vedotin Failure: Preliminary Results from a Phase 1b Study (KEYNOTE-013). Blood. 2014; 124:290. Thus, T cell-based therapeutics have an important and growing role in HL. Chimeric antigen receptor T cells (CART) represent an exciting recent development in cancer immunotherapy. Ruella M, Kalos M. Adoptive immunotherapy for cancer. Immunological reviews. 2014; 257:14-38. Our group and others have demonstrated the clinical efficacy of anti-CD19 chimeric antigen receptor redirected T cells (CART19, CTL019) for refractory B cell malignancies. Kalos M, Levine B L, Porter D L, Katz S, Grupp S A, Bagg A, et al. T cells with chimeric antigen receptors have potent antitumor effects and can establish memory in patients with advanced leukemia. Science translational medicine. 2011; 3:95ra73; Maude S L, Frey N, Shaw P A, Aplenc R, Barrett D M, Bunin N J, et al. Chimeric antigen receptor T cells for sustained remissions in leukemia. The New England journal of medicine. 2014; 371:1507-17; Davila M L, Riviere I, Wang X, Bartido S, Park J, Curran K, et al. Efficacy and Toxicity Management of 19-28z CAR T Cell Therapy in B Cell Acute Lymphoblastic Leukemia. Science translational medicine. 2014; 6:224ra25; Turtle C J, Hanafi L A, Berger C, Gooley T A, Cherian S, Hudecek M, et al. CD19 CAR-T cells of defined CD4+:CD8+ composition in adult B cell ALL patients. The Journal of clinical investigation. 2016; Lee D W, Kochenderfer J N, Stetler-Stevenson M, Cui Y K, Delbrook C, Feldman S A, et al. T cells expressing CD19 chimeric antigen receptors for acute lymphoblastic leukaemia in children and young adults: a phase 1 dose-escalation trial. Lancet. 2015; 385:517-28. However, despite the B-cell origin of Hodgkin Reed-Sternberg (HRS) cells, B-cell antigens including CD19 are rarely expressed in HL. Herbst H, Tippelmann G, Anagnostopoulos I, Gerdes J, Schwarting R, Boehm T, et al. Immunoglobulin and T-cell receptor gene rearrangements in Hodgkin's disease and Ki-1-positive anaplastic large cell lymphoma: dissociation between phenotype and genotype. Leukemia research. 1989; 13:103-16. While the CD30 antigen is known to be commonly expressed on HRS cells, outcomes of patients treated with anti-CD30 CART have been disappointing, with 1/8 complete responses (CR) and 4/8 stable disease (SD) and 3/8 progressive disease (PD) in r/r HL patients. Savoldo B, Rooney C M, Di Stasi A, Abken H, Hombach A, Foster A E, et al. Epstein Barr virus specific cytotoxic T lymphocytes expressing the anti-CD30zeta artificial chimeric T-cell receptor for immunotherapy of Hodgkin disease. Blood. 2007; 110:2620-30; Di Stasi A, De Angelis B, Rooney C M, Zhang L, Mahendravada A, Foster A E, et al. T lymphocytes coexpressing CCR4 and a chimeric antigen receptor targeting CD30 have improved homing and antitumor activity in a Hodgkin tumor model. Blood. 2009; 113:6392-402; Ramos C A, Ballard B, Liu E, Dakhova O, Mei Z, Liu H, et al. Chimeric T Cells for Therapy of CD30+ Hodgkin and Non-Hodgkin Lymphomas. Blood. 2015; 126:185-. In HL the malignant cells represent only approximately 1-2% of cellularity, with the majority comprised of infiltrating immune cells (macrophages and myeloid-derived suppressive cells, basophils, mast cells, eosinophils, B and T lymphocytes, stromal cells and fibroblasts). The TME and in particular tumor-associated macrophages (TAM) and/or myeloid derived suppressor cells (MDSCs) have a key role in promoting tumor growth while also inhibiting the anti-tumor immune response. Steidl C, Connors J M, Gascoyne R D. Molecular pathogenesis of Hodgkin's lymphoma: increasing evidence of the importance of the microenvironment. J Clin Oncol. 2011; 29:1812-26; Steidl C, Lee T, Shah S P, Farinha P, Han G, Nayar T, et al. Tumor-associated macrophages and survival in classic Hodgkin's lymphoma. The New England journal of medicine. 2010; 362:875-85; Sanchez-Aguilera A, Montalban C, de la Cueva P, Sanchez-Verde L, Morente M M, Garcia-Cosio M, et al. Tumor microenvironment and mitotic checkpoint are key factors in the outcome of classic Hodgkin lymphoma. Blood. 2006; 108:662-8; Devilard E, Bertucci F, Trempat P, Bouabdallah R, Loriod B, Giaconia A, et al. Gene expression profiling defines molecular subtypes of classical Hodgkin's disease. Oncogene. 2002; 21:3095-102; Mizuno H, Nakayama T, Miyata Y, Saito S, Nishiwaki S, Nakao N, et al. Mast cells promote the growth of Hodgkin's lymphoma cell tumor by modifying the tumor microenvironment that can be perturbed by bortezomib. Leukemia. 2012; 26:2269-76; Huber S, Hoffmann R, Muskens F, Voehringer D. Alternatively activated macrophages inhibit T-cell proliferation by Stat6-dependent expression of PD-L2. Blood. 2010; 116:3311-20. Thus, HL represents a unique opportunity to study the impact of the TME on immunotherapy. The development of an approach that could target the malignant cells as well as the supportive TME would likely represent an important advance in the field of CART immunotherapy, by providing robust stimulation of the CAR T cells while avoiding T cell inhibition. In this context we studied CD123, the a chain of the receptor for interleukin-3 (IL-3), whose expression has been previously described on Hodgkin Reed Sternberg (HRS) cells. Fromm J R. Flow cytometric analysis of CD123 is useful for immunophenotyping classical Hodgkin lymphoma. Cytometry B Clin Cytom. 2011; 80:91-9; Liu K, Zhu M, Huang Y, Wei S, Xie J, Xiao Y. CD123 and its potential clinical application in leukemias. Life sciences. 2015; 122:59-64; Hassanein N M, Alcancia F, Perkinson K R, Buckley P J, Lagoo A S. Distinct expression patterns of CD123 and CD34 on normal bone marrow B-cell precursors (“hematogones”) and B lymphoblastic leukemia blasts. American journal of clinical pathology. 2009; 132:573-80; Djokic M, Bjorklund E, Blennow E, Mazur J, Soderhall S, Porwit A. Overexpression of CD123 correlates with the hyperdiploid genotype in acute lymphoblastic leukemia. Haematologica. 2009; 94:1016-9; Aldinucci D, Poletto D, Gloghini A, Nanni P, Degan M, Perin T, et al. Expression of functional interleukin-3 receptors on Hodgkin and Reed-Sternberg cells. The American journal of pathology. 2002; 160:585-96. In addition, in vitro data show that IL-3 rescues HL cells from apoptosis and promotes HL cell line growth. Aldinucci D, Olivo K, Lorenzon D, Poletto D, Gloghini A, Carbone A, et al. The role of interleukin-3 in classical Hodgkin's disease. Leukemia & lymphoma. 2005; 46:303-11. Furthermore, since CD123 is expressed on myeloid cells, including macrophages, eosinophils, basophils and mast cells, we hypothesized that CD123 would be expressed extensively within HL tumor masses on both the malignant cells and the supportive TME. Pollard J W. Trophic macrophages in development and disease. Nat Rev Immunol. 2009; 9:259-70.

[0801] The objective of this Example was therefore to develop an anti-HL CAR T cell immunotherapy that would also be able to overcome the immunosuppression of the HL microenvironment. We confirmed the presence of CD123 on HRS cells and found that many immune cells in the HL TME, in particular immunosuppressive M2-type tumor-associated macrophages, express CD123. We previously developed anti-CD123 CAR T cells for the treatment of AML (Gill S, Tasian S K, Ruella M, Shestova O, Li Y, Porter D L, et al. Preclinical targeting of human acute myeloid leukemia and myeloablation using chimeric antigen receptor-modified T cells. Blood. 2014; 123:2343-54) and we now find that CART123 cells can eliminate disseminated HL tumor xenografts leading to durable remissions and the formation of immune memory. Furthermore, through co-targeting of immunosuppressive CD123-expressing tumor-associated macrophages, CART123 (unlike CART19) are resistant to microenvironmental immunosuppression.

[0802] Materials and Methods

[0803] Cell Lines and Primary Samples.

[0804] Cell lines were originally obtained from ATCC (Manassas, Va.) (K-562) or DSMZ (Braunschweig, Germany) (MOLM-14 and NALM-6). All cell lines were tested for the presence of mycoplasma contamination (MycoAlert™ Mycoplasma Detection Kit, LT07-318, Lonza, Basel, Switzerland). For some experiments, cell lines were transduced with luciferase (click-beetle green) or eGFP and then sorted to obtain a >99% positive population. MOLM-14 and K562 were used as controls as indicated in the relevant figures. The cell lines were maintained in culture with RPMI media 1640 (Gibco, 11875-085, LifeTechnologies, Grand Island, N.Y.) supplemented with 10% fetal bovine serum (FBS, Gemini, 100-106, West Sacramento, Calif.), and 50 UI/ml penicillin/streptomycin (Gibco, LifeTechnologies, 15070-063). For all functional studies, primary cells were thawed at least 12 hours before experiment and rested at 37° C. De-identified formalin-fixed primary human HL specimens were obtained from the clinical practices of University of Pennsylvania/Children's Hospital of Philadelphia under an Institutional Review Board (IRB)-protocol.

[0805] Immunohistochemistry and Immunofluorescence.

[0806] For formalin fixed paraffin embedded tissues immuno-histochemical (IHC) staining was performed on a Leica Bond-III instrument (Leica Biosystems, Buffalo Grove, Ill., USA) using the Bond Polymer Refine Detection System. Antibodies against CD30, CD123 were used undiluted. Heat-induced epitope retrieval was done for 20 minutes with ER2 solution (Leica Microsystems, AR9640). Images were digitally acquired using the Aperio ScanScope™ (Leica Biosystems).

[0807] RT-PCR.

[0808] HL and control cell lines were screened by RT-PCR analysis for CD123 (AB, Hs0060814) mRNA expression. RNA was extracted with RNAqueos-4PCR Kit (Ambion, LifeTechnologies, AM-1914) and cDNA was synthesized with iScript Reverse Transcription Supermix for RT-qPCR (BioRad, 170-8841). The relative target cDNA copies were quantified by relative qPCR (qPCR) with ABI TaqMan specific primers and probe set; TaqMan GUSB primers (AB, Hs00939627) and probe set were used for normalization.

[0809] Multiparametric Flow Cytometry.

[0810] Flow cytometry was performed as previously described. Kenderian S S, Ruella M, Shestova O, Klichinsky M, Aikawa V, Morrissette J J, et al. CD33 Specific Chimeric Antigen Receptor T Cells Exhibit Potent Preclinical Activity against Human Acute Myeloid Leukemia. Leukemia. 2015. Anti-human antibodies were purchased from Biolegend, eBioscience, or Becton Dickinson. For cell number quantitation, Countbright (Invitrogen) beads were used according to the manufacturer's instructions. In all analyses, the population of interest was gated based on forward vs. side scatter characteristics followed by singlet gating, and live cells were gated using Live Dead Fixable Aqua (Invitrogen). Time gating was included for quality control. Detection of CAR123 was performed using goat-anti-mouse antibody (Jackson Laboratories) or CD123-Fc/His (Sino Biologicals) and anti-His-APC (R&D) or PE (AbCam) or directly PE-conjugated CD123 protein. Flow cytometry was performed on a four-laser Fortessa-LSR II cytometer (Becton-Dickinson) and analyzed with FlowJo X 10.0.7r2 (Tree Star).

[0811] Human Macrophage Differentiation.

[0812] Human macrophages (MO) were generated by differentiating positively selected CD14+ normal donor monocytes (Human CD14 MicroBeads, Miltenyi Biotec) for 7 days in X-VIVO 10 (Lonza) supplemented with 5% GemCell human serum AB (Gemini BioProducts), 1× Glutamax (Gibco), and penicillin/streptomycin (Lonza). Macrophages were polarized to M1 by adding 20 ng/mL human IFNγ (Peprotech) and 100 ng/mL LPS (LPS-EK, InvivoGen) to the differentiation media for an additional 24 hours. Macrophages were polarized to M2 by adding either 20 ng/mL human IL-4, IL-10, or IL-13 (Peprotech) to the differentiation media for an additional 24 hours. The effect of Hodgkin lymphoma cells on macrophage phenotype was assessed by co-culturing MO human macrophages with HDLM-2 cells at a 1:1 effector to target ratio for 5 days in RPMI media 1640 (Gibco, 11875-085, LifeTechnologies, Grand Island, N.Y.) supplemented with 10% fetal bovine serum (FBS, Gemini, 100-106, West Sacramento, Calif.), and 50 UI/ml penicillin/streptomycin (Gibco, LifeTechnologies, 15070-063).

[0813] Generation of CAR Constructs and CAR T Cells.

[0814] The 2^{nd} generation anti-CD123 chimeric antigen receptor (CAR123) features an anti-CD123 scFv (clone 32716), CD8 hinge, 4-1BB costimulatory domain and CD3-t signaling domain. Gill S, Tasian S K, Ruella M, Shestova O, Li Y, Porter D L, et al. Preclinical targeting of human acute myeloid leukemia and myeloablation using chimeric antigen receptor-modified T cells. Blood. 2014; 123:2343-54. This construct is currently used in a clinical trial for acute myeloid leukemia at the University of Pennsylvania (NCT02623582). The murine anti-CD19 chimeric antigen receptor (CD8 hinge, 4-1BB co-stimulatory domain and CD3 zeta signaling domain) was generated as previously described. Milone M C, Fish J D, Carpenito C, Carroll R G, Binder G K, Teachey D, et al. Chimeric receptors containing CD137 signal transduction domains mediate enhanced survival of T cells and increased antileukemic efficacy in vivo. Molecular therapy: the journal of the American Society of Gene Therapy. 2009; 17:1453-64; Imai C, Mihara K, Andreansky M, Nicholson I C, Pui C H, Geiger T L, et al. Chimeric receptors with 4-1BB signaling capacity provoke potent cytotoxicity against acute lymphoblastic leukemia. Leukemia. 2004; 18:676-84. This is the same construct currently used in the CTL019 clinical trials at the University of Pennsylvania. Production of CAR-expressing T cells was performed as previously described. Gill S, Tasian S K, Ruella M, Shestova O, Li Y, Porter D L, et al. Preclinical targeting of human acute myeloid leukemia and myeloablation using chimeric antigen receptor-modified T cells. Blood. 2014; 123:2343-54. Normal donor CD4 and CD8 T cells or PB mononuclear cells (PBMC) were obtained from the Human Immunology Core of the University of Pennsylvania. Prior to all experiments, T cells were thawed and rested overnight at 37° C.

[0815] In Vitro T-Cell Effector Function Assays.

[0816] Degranulation, CFSE proliferation, cytotoxicity assays and cytokine measurements were performed as previously described. Kalos M, Levine B L, Porter D L, Katz S, Grupp S A, Bagg A, et al. T cells with chimeric antigen receptors have potent antitumor effects and can establish memory in patients with advanced leukemia. Science translational medicine. 2011; 3:95ra73; Gill S, Tasian S K, Ruella M, Shestova O, Li Y, Porter D L, et al. Preclinical targeting of human acute myeloid leukemia and myeloablation using chimeric antigen receptor-modified T cells. Blood. 2014; 123:2343-54; Ruella M, Kenderian S S, Shestova O, Fraietta J A, Qayyum S, Zhang Q, et al. The Addition of the BTK inhibitor Ibrutinib to Anti-CD19 Chimeric Antigen Receptor T Cells (CART19) Improves Responses against Mantle Cell Lymphoma. Clinical cancer research: an official journal of the American Association for Cancer Research. 2016. Phase contrast images of human macrophage and T cell co-culture (at 24 hours) were generated using the 20× lens on a Nikon Eclipse Ti-S microscope (Nikon Instruments, Inc.)

[0817] Animal Experiments.

[0818] In vivo experiments were performed as previously described. Kenderian S S, Ruella M, Shestova O, Klichinsky M, Aikawa V, Morrissette J J, et al. CD33 Specific Chimeric Antigen Receptor T Cells Exhibit Potent Preclinical Activity against Human Acute Myeloid Leukemia. Leukemia. 2015. Schemas of the utilized xenograft models are discussed in details in the relevant figures. NOD-SCID gamma chain deficient (NSG) mice originally obtained from Jackson Laboratories were purchased from the Stem Cell and Xenograft Core of the University of Pennsylvania. Cells (HL cell lines or T cells) were injected in 100-200 ul of PBS at the indicated concentration into the tail veins of mice. Bioluminescent imaging was performed using a Xenogen IVIS-200 Spectrum camera and analyzed with Livinglmage software v. 4.3.1 (Caliper LifeSciencies). Animals were euthanized at the end of the experiment or when they met pre-specified endpoints according to the IACUC protocols.

[0819] Study Approval.

[0820] Animal experiments were performed according a protocol (#803230) approved by the Institutional Animal Care and Use Committee (IACUC) that adheres to the NIH Guide for the Care and Use of Laboratory Animals.

[0821] Statistical Analysis.

[0822] All statistics were performed as indicated using GraphPad Prism 6 for Windows, version 6.05 (La Jolla, Calif.). Student's t-test was used to compare two groups; in analysis where multiple groups were compared, one-way analysis of variance (ANOVA) was performed with Holm-Sidak correction for multiple comparisons. When multiple groups at multiple time points/ratios were compared, the Student's t-test or ANOVA for each time points/ratios was used. Survival curves were compared using the log-rank test. In the figures asterisks are used to represent p-values (*=<0.05, **=<0.01, ***=<0.001, ****=<0.0001) and “ns” means “not significant” (p>0.05).

[0823] Results

[0824] The IL-3 receptor α, CD123, is expressed in Hodgkin Lymphoma cells and in tumor-associated macrophages

[0825] We sought to define a tumor-associated antigen expressed in the HRS but also on the microenvironment. For this purpose we evaluated the expression of CD123, the IL-3 receptor α, on histological specimens from patients with HL. As expected, in 10/10 patients the HRS cells were positive for the hallmark of HL, i.e. CD30; in 5/10 patients we also found CD123 on the HRS cells. Whereas CD30 was sparsely distributed on infiltrating immune cells, CD123 was highly expressed on the TME, in particular we found that TAM expressed CD123, as shown by dual-color immunofluorescence (FIG. 1A). To define an appropriate human tumor model for further study we evaluated four HL cell lines (HDLM-2, KM-H2, SUP-HD1, and L-428) and found high-level expression at the mRNA and protein level (FIGS. 1B and C).

[0826] HL cells polarize normal macrophages to a M2-like phenotype and function via IL-13

[0827] Since TAMs have a relevant role in HL pathogenesis and prognosis (Steidl C, Lee T, Shah S P, Farinha P, Han G, Nayar T, et al. Tumor-associated macrophages and survival in classic Hodgkin's lymphoma. The New England journal of medicine. 2010; 362:875-85), we sought to discover whether HL cells can directly mediate conversion of monocytes to an immunosuppressive phenotype. Human normal donor macrophages differentiated from peripheral blood monocytes were co-cultured with HDLM-2 cells or IL-4 (M2 positive control) or a control acute lymphoblastic leukemia cell line (NALM-6). After 24 hours of co-culture macrophage phenotype was analyzed by flow cytometry. As shown in FIG. 2 A, HDLM-2 primed macrophages showed a M2-like phenotype, with expression of CD206 and CD163 similar to that of IL4 primed macrophages. Gordon S. Alternative activation of macrophages. Nat Rev Immunol. 2003; 3:23-35; Murray P J, Allen J E, Biswas S K, Fisher E A, Gilroy D W, Goerdt S, et al. Macrophage activation and polarization: nomenclature and experimental guidelines. Immunity. 2014; 41:14-20; Qian B Z, Pollard J W. Macrophage diversity enhances tumor progression and metastasis. Cell. 2010; 141:39-51; Roszer T. Understanding the Mysterious M2 Macrophage through Activation Markers and Effector Mechanisms. Mediators of inflammation. 2015; 2015:816460; Georgoudaki A M, Prokopec K E, Boura V F, Hellqvist E, Sohn S, Ostling J, et al. Reprogramming Tumor-Associated Macrophages by Antibody Targeting Inhibits Cancer Progression and Metastasis. Cell reports. 2016; 15:2000-11. As a control, macrophages co-cultured with a non-HL cell line, NALM-6, showed a non-M2-like phenotype. Importantly, CD123 expression was high in both M2 and in HL-polarized macrophages (FIG. 2B).

[0828] In order to test the function of the phenotypically-defined immunosuppressive macrophages we used a model where human CAR T cells were co-cultured under MO (Human Serum, GM- or M-CSF), M1 (IFNγ/LPS) or M2 (IL-4) polarizing conditions, or with HL-polarized macrophages as a model of tumor-associated macrophages (TAM). In this experiment we used the gold-standard anti-CD19 CAR T cells as the “responder” cells and the CD19+B leukemia cell line NALM-6 as the “stimulator” cells. Milone M C, Fish J D, Carpenito C, Carroll R G, Binder G K, Teachey D, et al. Chimeric receptors containing CD137 signal transduction domains mediate enhanced survival of T cells and increased antileukemic efficacy in vivo. Molecular therapy: the journal of the American Society of Gene Therapy. 2009; 17:1453-64. As expected CART19 strongly proliferated in the presence of the target cell line, but this proliferation was inhibited in the presence of M2 macrophages or HL-polarized macrophages (FIG. 2C-E). In order to probe the mechanism of macrophage polarization by HL cells, we collected the supernatant of HDLM-2 (or a control non-HL cell line, K562), co-cultured with human macrophages and analyzed the presence of 30 different cytokines by Luminex assay. IL-13 was the most overexpressed cytokine (FIG. 2F). By blocking IL-13 signaling using a specific antibody we found partial reversal of immunosuppressive function of HL-primed macrophages (FIG. 2G) and reduction in the expression of the inhibitory receptor ligand PDL-1. (FIG. 2H).

[0829] Anti-CD123 Chimeric Antigen Receptor T Cells Kill HL Cells In Vitro and In Vivo

[0830] Having demonstrated the presence of CD123 in the HRS cells, we sought to demonstrate the extent to which anti-CD123 CAR T cells (CART123) can recognize HL cells, as measured by antigen-dependent CART proliferation, cytokine production and specific tumor lysis. We used the HDLM2 cell line as a model, given that it is impossible to propagate primary HL in culture and due to the lack of reliable primary HL xenograft models. CD123-expressing AML was used a positive control in these experiments, as we had previously demonstrated its sensitivity to CART123. In vitro, CART123 demonstrated specific CD107a degranulation and production of intracellular cytokines (IFNγ, IL-2, TNFα) when co-cultured with HL cells for 4-6 hours (FIG. 3A). At 24 hours a potent cytotoxicity against HL cells is exerted by CART123 but not control untransduced T cells (UTD) (FIG. 3B) and complete eradication of HL cells by day 4 is associated with massive T cell proliferation (day 20) (FIG. 3C). CART123 when co-cultured with HL cells (HDLM-2 or KM-H2) proliferate as demonstrated by absolute T cell number after 5 days (FIG. 3D) and CFSE dilution (FIG. 3E). Importantly, CART123 cells secrete effector cytokines like GM-CSF, IFNg, MIP1b and TNFa in the presence of HL cells (FIG. 3F). In summary, CART123 cells were exquisitely responsive in vitro to malignant HRS cells despite the fact that both HRS and TAM express PDL1 and produce immunosuppressive cytokines by HRS.

[0831] We then developed a novel rigorous xenograft model of systemically advanced HL model by injecting 1×10⁶ luciferase+ HDLM-2 cells intravenously on day 0 in NSG mice (FIG. 4A). Serial bioluminescent imaging (BLI) demonstrated tumor engraftment by day 7, which was followed by gradual increase in tumor burden over approximately 6 weeks, reproducing the indolent nature of the human disease. At day 42 when the tumor burden was 20-fold higher than baseline, mice were treated with 1.5×10⁶ CART123 cells or control T cells. CART123 induced complete and durable eradication of disseminated tumor within 14 days, leading to 100% relapse-free and 100% overall survival at 6 months (FIGS. 4 B and C). Mice were followed up for almost 1 year and no relapses were observed in CART123-treated mice while mice treated with control T cells had a median survival of 128 days (p=0.009). Tumor elimination was associated with extensive CAR T cell expansion in the peripheral blood, including both CD8+ and CD4+ cells as detected by flow cytometry in serial peripheral blood analyses, as seen in clinical studies of anti-CD19 CAR T cells (FIG. 4D).

[0832] CART123 establish long-term immunological memory in mice with HL

[0833] Long-term persistence and T cell memory play an important role in immunosurveillance and prevention of relapse. In order to demonstrate the formation of immunological memory, at a long follow up time (day 250) CART123 treated mice were rechallenged with the HDLM-2 HL cells (see experiment schema FIG. 5 A). Interestingly, in previously CART123 treated mice the tumor was rejected (FIG. 5 B), associated with a re-expansion of previously undetectable CART123 cells in the peripheral blood (˜10 months after T cell injection) (FIG. 5 C). In contrast, in control mice HL cells engrafted and led to the death of these mice (FIG. 5D).

[0834] CART123 are Resistant to the Inhibition of M2-Macrophages

[0835] Lastly, as we demonstrated that CAR T cells can be inhibited by M2 and HL-polarized macrophages and that these macrophages are CD123-positive, we sought to understand if CART123 were also susceptible to macrophage inhibition, or conversely, due to the expression of CD123 in HL-macrophages, they would receive additional stimulation.

[0836] We generated immunosuppressive M2 macrophages using either IL-4, or exposure to HDLM-2 cells. Using the pre-established model of CART19 model in B-acute lymphoblastic leukemia we showed that M2 TAMs can potently inhibit CART19 proliferation following CAR stimulation at day 5 but, in stark contrast, CART123 were not affected (FIG. 6 A). Importantly, CART123 actively recognize M2 macrophages and form aggregates around them at an early time point (24 hours) and exert significant cytotoxicity against TAMs by day 5, thereby overcoming TAM-mediated inhibition (FIG. 6 B). HL-macrophages were able to inhibit cytokine production by CART19 but not by CART123 (FIG. 6 C).

### DISCUSSION

[0837] We have previously described the activity of CART123 in human acute myeloid leukemia. Gill S, Tasian S K, Ruella M, Shestova O, Li Y, Porter D L, et al. Preclinical targeting of human acute myeloid leukemia and myeloablation using chimeric antigen receptor-modified T cells. Blood. 2014; 123:2343-54. Here, we confirm previous findings that HRS cells and HL cell lines express CD123 (Fromm J R. Flow cytometric analysis of CD123 is useful for immunophenotyping classical Hodgkin lymphoma. Cytometry B Clin Cytom. 2011; 80:91-9; Aldinucci D, Poletto D, Gloghini A, Nanni P, Degan M, Perin T, et al. Expression of functional interleukin-3 receptors on Hodgkin and Reed-Sternberg cells. The American journal of pathology. 2002; 160:585-96) and show that CART123 specifically degranulate, proliferate, produce cytokines and kill HL cells in vitro. In vivo, we show that human CD123-redirected T cells display potent therapeutic activity against disseminated HL, persist long-term after eradication of disease and are capable of mounting a robust recall response to tumor challenge. To our knowledge, this is the first xenograft model of disseminated Hodgkin lymphoma, and the nodal localization and indolent progression recapitulate some aspects of the clinical disease. The xenograft system however does not permit an evaluation of the role of the tumor microenvironment (TME), since the murine NSG recipients lack lymphocytes and no human immune cells are transferred along with the HL cell line. Therefore, to investigate the role of the TME in resistance to CAR T cells we turned to an in vitro system.

[0838] We showed that HL cell lines produce several immunosuppressive cytokines, with the most highly elevated being interleukin-13. IL-13 has previously been reported to play a role in autocrine growth stimulation of HRS cells (Trieu Y, Wen X Y, Skinnider B F, Bray M R, Li Z, Claudio J O, et al. Soluble interleukin-13Ralpha2 decoy receptor inhibits Hodgkin's lymphoma growth in vitro and in vivo. Cancer research. 2004; 64:3271-5; Skinnider B F, Kapp U, Mak T W. The role of interleukin 13 in classical Hodgkin lymphoma. Leukemia & lymphoma. 2002; 43:1203-10) and has been postulated to mediate recruitment of immune cells into the HL TME. We showed that exposure to HL polarizes macrophages towards an alternatively-activated “M2” phenotype with up-regulation of PD-L1 and a resultant immunosuppressive effect on T cells, in particular CAR T cells. This effect manifested as reduction of T cell proliferation and cytokine production. We used anti-CD19 CAR T cells (CART19) stimulated by the ALL cell line NALM-6 as a “gold standard”. Milone M C, Fish J D, Carpenito C, Carroll R G, Binder G K, Teachey D, et al. Chimeric receptors containing CD137 signal transduction domains mediate enhanced survival of T cells and increased antileukemic efficacy in vivo. Molecular therapy: the journal of the American Society of Gene Therapy. 2009; 17:1453-64; Brentjens R J, Latouche J B, Santos E, Marti F, Gong M C, Lyddane C, et al. Eradication of systemic B-cell tumors by genetically targeted human T lymphocytes co-stimulated by CD80 and interleukin-15. Nature medicine. 2003; 9:279-86. We found that HL-exposed macrophages, as a model of tumor-associated macrophages (TAM) are able to inhibit CART19. Although CD19 is not expressed on HL and CART19 therapy is not expected to have activity in HL, there is literature on clonotypic CD19+B cells in HL and some groups including ours have attempted B cell-directed agents as therapy for HL (Younes A, Oki Y, McLaughlin P, Copeland A R, Goy A, Pro B, et al. Phase 2 study of rituximab plus ABVD in patients with newly diagnosed classical Hodgkin lymphoma. Blood. 2012; 119:4123-8; Kasamon Y L, Jacene H A, Gocke C D, Swinnen L J, Gladstone D E, Perkins B, et al. Phase 2 study of rituximab-ABVD in classical Hodgkin lymphoma. Blood. 2012; 119:4129-32) and a trial run at our institution evaluating CAR T cells against CD19 for HL (NCT02277522). More importantly, if our findings are generalizable to TAM in other malignancies, TAM may have a similar effect on CART19 in bone fide CD19-expressing B cell malignancies.

[0839] In this context, we sought to develop a relevant CART cell modality for HL. The most widely expressed HL antigen, CD30, is not expressed on most other cells in the TME and specifically not on TAM. Following reports that CD123 is expressed on HRS cells we analyzed a series of clinical specimens from the pathology department of the University of Pennsylvania and observed that CD123 is present on the HRS cells in approximately 50% of patients. Equally importantly, we noted CD123 to be present on TAM. Since elevated numbers of CD68+ macrophages in the diagnostic specimens of patients with HL confer an unfavorable prognosis, we hypothesized that a modality that was able to ablate both TAM and HRS cells would represent a significant advance in the growing armamentarium against HL. Steidl C, Lee T, Shah S P, Farinha P, Han G, Nayar T, et al. Tumor-associated macrophages and survival in classic Hodgkin's lymphoma. The New England journal of medicine. 2010; 362:875-85. Notably, recent advances in HL therapy include the PD1 antagonist nivolumab and although the presumed mechanism of action is reversal of inhibitory signaling from PD-L1 that is expressed on the HRS cells, the importance of PD-L1 expression on TAM in the response to nivolumab has not yet been investigated to our knowledge. The finding that TAM express CD123 and are targetable by CART123 adds to the growing body of literature on depletion of TAM using monoclonal antibodies directed against CSF1R. Pyonteck S M, Akkari L, Schuhmacher A J, Bowman R L, Sevenich L, Quail D F, et al. CSF-1R inhibition alters macrophage polarization and blocks glioma progression. Nature medicine. 2013; 19:1264-72.

[0840] Thus, in this work we highlight a lymphoma-macrophage-T cell axis that may be particularly vulnerable to anti-CD123 CAR T cells. Our previous publication on the anti-leukemia efficacy of anti-CD123 CAR T cells (CART123) also highlighted the potential for myeloablation resulting from targeting CD123 on normal hematopoieitic precursors. Thus, our current clinical trial utilizes short-acting mRNA-electroporated CAR T cells rather than permanently modified lentivirally transduced CAR T cells. (NCT02623582). Notably, there are currently 13 trials investigating CD123 as a target for hematological cancers using CAR T cells, bi-specific antibodies, monoclonal antibodies or antibody-drug conjugates. E.g., Liu K, Zhu M, Huang Y, Wei S, Xie J, Xiao Y. CD123 and its potential clinical application in leukemias. Life sciences. 2015; 122:59-64; Gill S, Tasian S K, Ruella M, Shestova O, Li Y, Porter D L, et al. Preclinical targeting of human acute myeloid leukemia and myeloablation using chimeric antigen receptor-modified T cells. Blood. 2014; 123:2343-54; Angelot-Delettre F, Roggy A, Frankel A E, Lamarthee B, Seilles E, Biichle S, et al. In vivo and in vitro sensitivity of blastic plasmacytoid dendritic cell neoplasm to SL-401, an interleukin-3 receptor targeted biologic agent. Haematologica. 2015; 100:223-30; Cohen K A, Liu T F, Cline J M, Wagner J D, Hall P D, Frankel A E. Safety evaluation of DT3881L3, a diphtheria toxin/interleukin 3 fusion protein, in the cynomolgus monkey. Cancer immunology, immunotherapy: CII. 2005; 54:799-806; He S Z, Busfield S, Ritchie D S, Hertzberg M S, Durrant S, Lewis I D, et al. A Phase 1 study of the safety, pharmacokinetics and anti-leukemic activity of the anti-CD123 monoclonal antibody CSL360 in relapsed, refractory or high-risk acute myeloid leukemia. Leukemia & lymphoma. 2014:1-10; Zereshkian A, Leyton J V, Cai Z, Bergstrom D, Weinfeld M, Reilly R M. The human polynucleotide kinase/phosphatase (hPNKP) inhibitor Al2B4C3 radiosensitizes human myeloid leukemia cells to Auger electron-emitting anti-CD123 (1)(1)(1)In-NLS-7G3 radioimmunoconjugates. Nuclear medicine and biology. 2014; 41:377-83; Kuo S R, Wong L, Liu J S. Engineering a CD123×CD3 bispecific scFv immunofusion for the treatment of leukemia and elimination of leukemia stem cells. Protein engineering, design & selection: PEDS. 2012; 25:561-9; Chichili G R, Huang L, Li H, Burke S, He L, Tang Q, et al. A CD3×CD123 bispecific DART for redirecting host T cells to myelogenous leukemia: Preclinical activity and safety in nonhuman primates. Science translational medicine. 2015; 7:289ra82; Fan D, Li Z, Zhang X, Yang Y, Yuan X, Zhang X, et al. AntiCD3Fv fused to human interleukin-3 deletion variant redirected T cells against human acute myeloid leukemic stem cells. Journal of hematology & oncology. 2015; 8:18; Mardiros A, Dos Santos C, McDonald T, Brown C E, Wang X, Budde L E, et al. T cells expressing CD123-specific chimeric antigen receptors exhibit specific cytolytic effector functions and antitumor effects against human acute myeloid leukemia. Blood. 2013; 122:3138-48; Tettamanti S, Magnani C F, Biondi A, Biagi E. Acute myeloid leukemia and novel biological treatments: monoclonal antibodies and cell-based gene-modified immune effectors. Immunology letters. 2013; 155:43-6. A recent case report described one patient treated with lentivirally-transduced CART123 showing the feasibility of this approach, supported by preliminary results from other CD123-targeted agents. Luo Y, Chang L-J, Hu Y, Dong L, Wei G, Huang H. First-in-Man CD123-Specific Chimeric Antigen Receptor-Modified T Cells for the Treatment of Refractory Acute Myeloid Leukemia. Blood. 2015; 126:3778-; Frankel A E, Woo J H, Ahn C, Pemmaraju N, Medeiros B C, Carraway H E, et al. Activity of SL-401, a targeted therapy directed to interleukin-3 receptor, in blastic plasmacytoid dendritic cell neoplasm patients. Blood. 2014; 124:385-92; He S Z, Busfield S, Ritchie D S, Hertzberg M S, Durrant S, Lewis I D, et al. A Phase 1 study of the safety, pharmacokinetics and anti-leukemic activity of the anti-CD123 monoclonal antibody CSL360 in relapsed, refractory or high-risk acute myeloid leukemia. Leukemia & lymphoma. 2015; 56:1406-15.

[0841] In summary, we showed that human CD123-redirected T cells display potent therapeutic activity against disseminated HL. Importantly CART123 can target both the HRS and the TAM. The observation that CART123 lead to myelosuppression in preclinical models, suggests that our findings could be translated to treat patients with refractory HL with a combined “short-acting” RNA-CAR123 or with depletable CART123 T cells followed by rescue autologous bone marrow transplantation. As well, this Example demonstrates that combination therapy of an IL-13 inhibitor together with CART cell therapy, for example, CART cells targeting a solid tumor, is a viable strategy for the treatment of solid tumors

### EQUIVALENTS

[0842] The disclosures of each and every patent, patent application, and publication cited herein are hereby incorporated herein by reference in their entirety. While this invention has been disclosed with reference to specific aspects, it is apparent that other aspects and variations of this invention may be devised by others skilled in the art without departing from the true spirit and scope of the invention. The appended claims are intended to be construed to include all such aspects and equivalent variations.

The application's sequence listing, which the Patent Office published only in electronic form, follows.

SEQUENCE LISTING (2589 sequences)

SEQ ID NO: 1 - DNA, 1184 bp, Artificial Sequence
  source: /note="Description of Artificial Sequence: Synthetic polynucleotide"
cgtgaggctccggtgcccgtcagtgggcagagcgcacatcgcccacagtccccgagaagttggggggaggggtcggcaattgaaccggtgcctagagaaggtggcgcggggtaaactgggaaagtgatgtcgtgtactggctccgcctttttcccgagggtgggggagaaccgtatataagtgcagtagtcgccgtgaacgttctttttcgcaacgggtttgccgccagaacacaggtaagtgccgtgtgtggttcccgcgggcctggcctctttacgggttatggcccttgcgtgccttgaattacttccacctggctgcagtacgtgattcttgatcccgagcttcgggttggaagtgggtgggagagttcgaggccttgcgcttaaggagccccttcgcctcgtgcttgagttgaggcctggcctgggcgctggggccgccgcgtgcgaatctggtggcaccttcgcgcctgtctcgctgctttcgataagtctctagccatttaaaatttttgatgacctgctgcgacgctttttttctggcaagatagtcttgtaaatgcgggccaagatctgcacactggtatttcggtttttggggccgcgggcggcgacggggcccgtgcgtcccagcgcacatgttcggcgaggcggggcctgcgagcgcggccaccgagaatcggacgggggtagtctcaagctggccggcctgctctggtgcctggcctcgcgccgccgtgtatcgccccgccctgggcggcaaggctggcccggtcggcaccagttgcgtgagcggaaagatggccgcttcccggccctgctgcagggagctcaaaatggaggacgcggcgctcgggagagcgggcgggtgagtcacccacacaaaggaaaagggcctttccgtcctcagccgtcgcttcatgtgactccacggagtaccgggcgccgtccaggcacctcgattagttctcgagcttttggagtacgtcgtctttaggttggggggaggggttttatgcgatggagtttccccacactgagtgggtggagactgaagttaggccagcttggcacttgatgtaattctccttggaatttgccctttttgagtttggatcttggttcattctcaagcctcagacagtggttcaaagtttttttcttccatttcaggtgtcgtga

SEQ ID NO: 2 - protein, 21 aa, Artificial Sequence
  source: /note="Description of Artificial Sequence: Synthetic peptide"
MALPVTALLLPLALLLHAARP

SEQ ID NO: 3 - DNA, 63 bp, Artificial Sequence
  source: /note="Description of Artificial Sequence: Synthetic oligonucleotide"
atggccctgcctgtgacagccctgctgctgcctctggctctgctgctgcatgccgctagaccc

SEQ ID NO: 4 - protein, 45 aa, Artificial Sequence
  source: /note="Description of Artificial Sequence: Synthetic polypeptide"
TTTPAPRPPTPAPTIASQPLSLRPEACRPAAGGAVHTRGLDFACD

SEQ ID NO: 5 - DNA, 135 bp, Artificial Sequence
  source: /note="Description of Artificial Sequence: Synthetic polynucleotide"
accacgacgccagcgccgcgaccaccaacaccggcgcccaccatcgcgtcgcagcccctgtccctgcgcccagaggcgtgccggccagcggcggggggcgcagtgcacacgagggggctggacttcgcctgtgat

SEQ ID NO: 6 - protein, 230 aa, Artificial Sequence
  source: /note="Description of Artificial Sequence: Synthetic polypeptide"
ESKYGPPCPPCPAPEFLGGPSVFLFPPKPKDTLMISRTPEVTCVVVDVSQEDPEVQFNWYVDGVEVHNAKTKPREEQFNSTYRVVSVLTVLHQDWLNGKEYKCKVSNKGLPSSIEKTISKAKGQPREPQVYTLPPSQEEMTKNQVSLTCLVKGFYPSDIAVEWESNGQPENNYKTTPPVLDSDGSFFLYSRLTVDKSRWQEGNVFSCSVMHEALHNHYTQKSLSLSLGKM

SEQ ID NO: 7 - DNA, 690 bp, Artificial Sequence
  source: /note="Description of Artificial Sequence: Synthetic polynucleotide"
gagagcaagtacggccctccctgccccccttgccctgcccccgagttcctgggcggacccagcgtgttcctgttcccccccaagcccaaggacaccctgatgatcagccggacccccgaggtgacctgtgtggtggtggacgtgtcccaggaggaccccgaggtccagttcaactggtacgtggacggcgtggaggtgcacaacgccaagaccaagccccgggaggagcagttcaatagcacctaccgggtggtgtccgtgctgaccgtgctgcaccaggactggctgaacggcaaggaatacaagtgtaaggtgtccaacaagggcctgcccagcagcatcgagaaaaccatcagcaaggccaagggccagcctcgggagccccaggtgtacaccctgccccctagccaagaggagatgaccaagaaccaggtgtccctgacctgcctggtgaagggcttctaccccagcgacatcgccgtggagtgggagagcaacggccagcccgagaacaactacaagaccaccccccctgtgctggacagcgacggcagcttcttcctgtacagccggctgaccgtggacaagagccggtggcaggagggcaacgtctttagctgctccgtgatgcacgaggccctgcacaaccactacacccagaagagcctgagcctgtccctgggcaagatg

SEQ ID NO: 8 - protein, 282 aa, Artificial Sequence
  source: /note="Description of Artificial Sequence: Synthetic polypeptide"
RWPESPKAQASSVPTAQPQAEGSLAKATTAPATTRNTGRGGEEKKKEKEKEEQEERETKTPECPSHTQPLGVYLLTPAVQDLWLRDKATFTCFVVGSDLKDAHLTWEVAGKVPTGGVEEGLLERHSNGSQSQHSRLTLPRSLWNAGTSVTCTLNHPSLPPQRLMALREPAAQAPVKLSLNLLASSDPPEAASWLLCEVSGFSPPNILLMWLEDQREVNTSGFAPARPPPQPGSTTFWAWSVLRVPAPPSPQPATYTCVVSHEDSRTLLNASRSLEVSYVTDH

SEQ ID NO: 9 - DNA, 847 bp, Artificial Sequence
  source: /note="Description of Artificial Sequence: Synthetic polynucleotide"
aggtggcccgaaagtcccaaggcccaggcatctagtgttcctactgcacagccccaggcagaaggcagcctagccaaagctactactgcacctgccactacgcgcaatactggccgtggcggggaggagaagaaaaaggagaaagagaaagaagaacaggaagagagggagaccaagacccctgaatgtccatcccatacccagccgctgggcgtctatctcttgactcccgcagtacaggacttgtggcttagagataaggccacctttacatgtttcgtcgtgggctctgacctgaaggatgcccatttgacttgggaggttgccggaaaggtacccacagggggggttgaggaagggttgctggagcgccattccaatggctctcagagccagcactcaagactcacccttccgagatccctgtggaacgccgggacctctgtcacatgtactctaaatcatcctagcctgcccccacagcgtctgatggcccttagagagccagccgcccaggcaccagttaagcttagcctgaatctgctcgccagtagtgatcccccagaggccgccagctggctcttatgcgaagtgtccggctttagcccgcccaacatcttgctcatgtggctggaggaccagcgagaagtgaacaccagcggcttcgctccagcccggcccccaccccagccgggttctaccacattctgggcctggagtgtcttaagggtcccagcaccacctagcccccagccagccacatacacctgtgttgtgtcccatgaagatagcaggaccctgctaaatgcttctaggagtctggaggtttcctacgtgactgaccatt

SEQ ID NO: 10 - protein, 10 aa, Artificial Sequence
  source: /note="Description of Artificial Sequence: Synthetic peptide"
GGGGSGGGGS

SEQ ID NO: 11 - DNA, 30 bp, Artificial Sequence
  source: /note="Description of Artificial Sequence: Synthetic oligonucleotide"
ggtggcggaggttctggaggtggaggttcc

SEQ ID NO: 12 - protein, 24 aa, Artificial Sequence
  source: /note="Description of Artificial Sequence: Synthetic peptide"
IYIWAPLAGTCGVLLLSLVITLYC

SEQ ID NO: 13 - DNA, 72 bp, Artificial Sequence
  source: /note="Description of Artificial Sequence: Synthetic oligonucleotide"
atctacatctgggcgcccttggccgggacttgtggggtccttctcctgtcactggttatcaccctttactgc

SEQ ID NO: 14 - protein, 42 aa, Artificial Sequence
  source: /note="Description of Artificial Sequence: Synthetic polypeptide"
KRGRKKLLYIFKQPFMRPVQTTQEEDGCSCRFPEEEEGGCEL

SEQ ID NO: 15 - DNA, 126 bp, Artificial Sequence
  source: /note="Description of Artificial Sequence: Synthetic polynucleotide"
aaacggggcagaaagaaactcctgtatatattcaaacaaccatttatgagaccagtacaaactactcaagaggaagatggctgtagctgccgatttccagaagaagaagaaggaggatgtgaactg

SEQ ID NO: 16 - protein, 48 aa, Artificial Sequence
  source: /note="Description of Artificial Sequence: Synthetic polypeptide"
QRRKYRSNKGESPVEPAEPCRYSCPREEEGSTIPIQEDYRKPEPACSP

SEQ ID NO: 17 - DNA, 123 bp, Artificial Sequence
  source: /note="Description of Artificial Sequence: Synthetic polynucleotide"
aggagtaagaggagcaggctcctgcacagtgactacatgaacatgactccccgccgccccgggcccacccgcaagcattaccagccctatgccccaccacgcgacttcgcagcctatcgctcc

SEQ ID NO: 18 - protein, 112 aa, Artificial Sequence
  source: /note="Description of Artificial Sequence: Synthetic polypeptide"
RVKFSRSADAPAYKQGQNQLYNELNLGRREEYDVLDKRRGRDPEMGGKPRRKNPQEGLYNELQKDKMAEAYSEIGMKGERRRGKGHDGLYQGLSTATKDTYDALHMQALPPR

SEQ ID NO: 19 - DNA, 336 bp, Artificial Sequence
  source: /note="Description of Artificial Sequence: Synthetic polynucleotide"
agagtgaagttcagcaggagcgcagacgcccccgcgtacaagcagggccagaaccagctctataacgagctcaatctaggacgaagagaggagtacgatgttttggacaagagacgtggccgggaccctgagatggggggaaagccgagaaggaagaaccctcaggaaggcctgtacaatgaactgcagaaagataagatggcggaggcctacagtgagattgggatgaaaggcgagcgccggaggggcaaggggcacgatggcctttaccagggtctcagtacagccaccaaggacacctacgacgcccttcacatgcaggccctgccccctcgc

SEQ ID NO: 20 - protein, 112 aa, Artificial Sequence
  source: /note="Description of Artificial Sequence: Synthetic polypeptide"
RVKFSRSADAPAYQQGQNQLYNELNLGRREEYDVLDKRRGRDPEMGGKPRRKNPQEGLYNELQKDKMAEAYSEIGMKGERRRGKGHDGLYQGLSTATKDTYDALHMQALPPR

SEQ ID NO: 21 - DNA, 336 bp, Artificial Sequence
  source: /note="Description of Artificial Sequence: Synthetic polynucleotide"
agagtgaagttcagcaggagcgcagacgcccccgcgtaccagcagggccagaaccagctctataacgagctcaatctaggacgaagagaggagtacgatgttttggacaagagacgtggccgggaccctgagatggggggaaagccgagaaggaagaaccctcaggaaggcctgtacaatgaactgcagaaagataagatggcggaggcctacagtgagattgggatgaaaggcgagcgccggaggggcaaggggcacgatggcctttaccagggtctcagtacagccaccaaggacacctacgacgcccttcacatgcaggccctgccccctcgc

SEQ ID NO: 22 - protein, 5 aa, Artificial Sequence
  source: /note="Description of Artificial Sequence: Synthetic peptide"
GGGGS

SEQ ID NO: 23 - DNA, 30 bp, Artificial Sequence; identical to SEQ ID NO: 11
  source: /note="Description of Artificial Sequence: Synthetic oligonucleotide"

SEQ ID NO: 24 - protein, 150 aa, Artificial Sequence [sequence omitted]

SEQ ID NO: 25 - DNA, 450 bp, Artificial Sequence
  source: /note="Description of Artificial Sequence: Synthetic polynucleotide"
cccggatggtttctggactctccggatcgcccgtggaatcccccaaccttctcaccggcactcttggttgtgactgagggcgataatgcgaccttcacgtgctcgttctccaacacctccgaatcattcgtgctgaactggtaccgcatgagcccgtcaaaccagaccgacaagctcgccgcgtttccggaagatcggtcgcaaccgggacaggattgtcggttccgcgtgactcaactgccgaatggcagagacttccacatgagcgtggtccgcgctaggcgaaacgactccgggacctacctgtgcggagccatctcgctggcgcctaaggcccaaatcaaagagagcttgagggccgaactgagagtgaccgagcgcagagctgaggtgccaactgcacatccatccccatcgcctcggcctgcggggcagtttcagaccctggtc

SEQ ID NO: 26 - protein, 394 aa, Artificial Sequence
  source: /note="Description of Artificial Sequence: Synthetic polypeptide"
MALPVTALLLPLALLLHAARPPGWFLDSPDRPWNPPTFSPALLVVTEGDNATFTCSFSNTSESFVLNWYRMSPSNQTDKLAAFPEDRSQPGQDCRFRVTQLPNGRDFHMSVVRARRNDSGTYLCGAISLAPKAQIKESLRAELRVTERRAEVPTAHPSPSPRPAGQFQTLVTTTPAPRPPTPAPTIASQPLSLRPEACRPAAGGAVHTRGLDFACDIYIWAPLAGTCGVLLLSLVITLYCKRGRKKLLYIFKQPFMRPVQTTQEEDGCSCRFPEEEEGGCELRVKFSRSADAPAYKQGQNQLYNELNLGRREEYDVLDKRRGRDPEMGGKPRRKNPQEGLYNELQKDKMAEAYSEIGMKGERRRGKGHDGLYQGLSTATKDTYDALHMQALPPR

SEQ ID NO: 27 - DNA, 1182 bp, Artificial Sequence
  source: /note="Description of Artificial Sequence: Synthetic polynucleotide"
atggccctccctgtcactgccctgcttctccccctcgcactcctgctccacgccgctagaccacccggatggtttctggactctccggatcgcccgtggaatcccccaaccttctcaccggcactcttggttgtgactgagggcgataatgcgaccttcacgtgctcgttctccaacacctccgaatcattcgtgctgaactggtaccgcatgagcccgtcaaaccagaccgacaagctcgccgcgtttccggaagatcggtcgcaaccgggacaggattgtcggttccgcgtgactcaactgccgaatggcagagacttccacatgagcgtggtccgcgctaggcgaaacgactccgggacctacctgtgcggagccatctcgctggcgcctaaggcccaaatcaaagagagcttgagggccgaactgagagtgaccgagcgcagagctgaggtgccaactgcacatccatccccatcgcctcggcctgcggggcagtttcagaccctggtcacgaccactccggcgccgcgcccaccgactccggccccaactatcgcgagccagcccctgtcgctgaggccggaagcatgccgccctgccgccggaggtgctgtgcatacccggggattggacttcgcatgcgacatctacatttgggctcctctcgccggaacttgtggcgtgctccttctgtccctggtcatcaccctgtactgcaagcggggtcggaaaaagcttctgtacattttcaagcagcccttcatgaggcccgtgcaaaccacccaggaggaggacggttgctcctgccggttccccgaagaggaagaaggaggttgcgagctgcgcgtgaagttctcccggagcgccgacgcccccgcctataagcagggccagaaccagctgtacaacgaactgaacctgggacggcgggaagagtacgatgtgctggacaagcggcgcggccgggaccccgaaatgggcgggaagcctagaagaaagaaccctcaggaaggcctgtataacgagctgcagaaggacaagatggccgaggcctactccgaaattgggatgaagggagagcggcggaggggaaaggggcacgacggcctgtaccaaggactgtccaccgccaccaaggacacatacgatgccctgcacatgcaggcccttccccctcgc

SEQ ID NO: 28 - protein, 40 aa, Artificial Sequence
  source: /note="Description of Artificial Sequence: Synthetic polypeptide"
  MISC_FEATURE (1)..(40): /note="This region may encompass 1-10 "Gly Gly Gly Ser" repeating units"
GGGSGGGSGGGSGGGSGGGSGGGSGGGSGGGSGGGSGGGS

SEQ ID NO: 29 - protein, 20 aa, Artificial Sequence
  source: /note="Description of Artificial Sequence: Synthetic peptide"
GGGGSGGGGSGGGGSGGGGS

SEQ ID NO: 30 - protein, 15 aa, Artificial Sequence
  source: /note="Description of Artificial Sequence: Synthetic peptide"
GGGGSGGGGSGGGGS

SEQ ID NO: 31 - protein, 4 aa, Artificial Sequence
  source: /note="Description of Artificial Sequence: Synthetic peptide"
GGGS

SEQ ID NO: 32 - DNA, 2000 bp, Artificial Sequence
  source: /note="Description of Artificial Sequence: Synthetic polynucleotide"
  misc_feature (1)..(2000): /note="This sequence may encompass 50-2000 nucleotides"
aaaaaaaaaaaaaaaaaaaaaaaaaaaaaaaaaaaaaaaaaaaaaaaaaaaaaaaaaaaaaaaaaaaaaaaaaaaaaaaaaaaaaaaaaaaaaaaaaaaaaaaaaaaaaaaaaaaaaaaaaaaaaaaaaaaaaaaaaaaaaaaaaaaaaaaaaaaaaaaaaaaaaaaaaaaaaaaaaaaaaaaaaaaaaaaaaaaaaaaaaaaaaaaaaaaaaaaaaaaaaaaaaaaaaaaaaaaaaaaaaaaaaaaaaaaaaaaaaaaaaaaaaaaaaaaaaaaaaaaaaaaaaaaaaaaaaaaaaaaaaaaaaaaaaaaaaaaaaaaaaaaaaaaaaaaaaaaaaaaaaaaaaaaaaaaaaaaaaaaaaaaaaaaaaaaaaaaaaaaaaaaaaaaaaaaaaaaaaaaaaaaaaaaaaaaaaaaaaaaaaaaaaaaaaaaaaaaaaaaaaaaaaaaaaaaaaaaaaaaaaaaaaaaaaaaaaaaaaaaaaaaaaaaaaaaaaaaaaaaaaaaaaaaaaaaaaaaaaaaaaaaaaaaaaaaaaaaaaaaaaaaaaaaaaaaaaaaaaaaaaaaaaaaaaaaaaaaaaaaaaaaaaaaaaaaaaaaaaaaaaaaaaaaaaaaaaaaaaaaaaaaaaaaaaaaaaaaaaaaaaaaaaaaaaaaaaaaaaaaaaaaaaaaaaaaaaaaaaaaaaaaaaaaaaaaaaaaaaaaaaaaaaaaaaaaaaaaaaaaaaaaaaaaaaaaaaaaaaaaaaaaaaaaaaaaaaaaaaaaaaaaaaaaaaaaaaaaaaaaaaaaaaaaaaaaaaaaaaaaaaaaaaaaaaaaaaaaaaaaaaaaaaaaaaaaaaaaaaaaaaaaaaaaaaaaaaaaaaaaaaaaaaaaaaaaaaaaaaaaaaaaaaaaaaaaaaaaaaaaaaaaaaaaaaaaaaaaaaaaaaaaaaaaaaaaaaaaaaaaaaaaaaaaaaaaaaaaaaaaaaaaaaaaaaaaaaaaaaaaaaaaaaaaaaaaaaaaaaaaaaaaaaaaaaaaaaaaaaaaaaaaaaaaaaaaaaaaaaaaaaaaaaaaaaaaaaaaaaaaaaaaaaaaaaaaaaaaaaaaaaaaaaaaaaaaaaaaaaaaaaaaaaaaaaaaaaaaaaaaaaaaaaaaaaaaaaaaaaaaaaaaaaaaaaaaaaaaaaaaaaaaaaaaaaaaaaaaaaaaaaaaaaaaaaaaaaaaaaaaaaaaaaaaaaaaaaaaaaaaaaaaaaaaaaaaaaaaaaaaaaaaaaaaaaaaaaaaaaaaaaaaaaaaaaaaaaaaaaaaaaaaaaaaaaaaaaaaaaaaaaaaaaaaaaaaaaaaaaaaaaaaaaaaaaaaaaaaaaaaaaaaaaaaaaaaaaaaaaaaaaaaaaaaaaaaaaaaaaaaaaaaaaaaaaaaaaaaaaaaaaaaaaaaaaaaaaaaaaaaaaaaaaaaaaaaaaaaaaaaaaaaaaaaaaaaaaaaaaaaaaaaaaaaaaaaaaaaaaaaaaaaaaaaaaaaaaaaaaaaaaaaaaaaaaaaaaaaaaaaaaaaaaaaaaaaaaaaaaaaaaaaaaaaaaaaaaaaaaaaaaaaaaaaaaaaaaaaaaaaaaaaaaaaaaaaaaaaaaaaaaaaaaaaaaaaaaaaaaaaaaaaaaaaaaaaaaaaaaaaaaaaaaaaaaaaaaaaaaaaaaaaaaaaaaaaaaaaaaaaaaaaaaaaaaaaaaaaaaaaaaaaaaaaaaaaaaaaaaaaaaaaaaaaaaaaaaaaaaaaaaaaaaaaaaaaaaaaaaaaaaaaaaaaaaaaaaaaaaaaaaaaaaaaaaaaaaaaaaaaaaaaaaaaaaaaaaaaaaaaaaaaaaaaaaaaaaaaaaaaaaaaaaaaaaaaaaaaaaaaaaaaaaaaaaaaaaaaaaaaaaaaaaaaaaaaaaaaaaaaaaaaaaaaaaaaaaaaaaaaaaaaaaaaaaaaaaaaaaaaaaaaaaaaaaaaaaaaaaaaaaaaaaaaaaaaaaaaaaaaaaaaaaaaaaaaaaaaaaaaa

SEQ ID NO: 33 - DNA, 150 bp, Artificial Sequence
  source: /note="Description of Artificial Sequence: Synthetic polynucleotide"
aaaaaaaaaaaaaaaaaaaaaaaaaaaaaaaaaaaaaaaaaaaaaaaaaaaaaaaaaaaaaaaaaaaaaaaaaaaaaaaaaaaaaaaaaaaaaaaaaaaaaaaaaaaaaaaaaaaaaaaaaaaaaaaaaaaaaaaaaaaaaaaaaaaaaa

SEQ ID NO: 34 - DNA, 5000 bp, Artificial Sequence
  source: /note="Description of Artificial Sequence: Synthetic polynucleotide"
  misc_feature (1)..(5000): /note="This sequence may encompass 100-5000 nucleotides"
aaaaaaaaaaaaaaaaaaaaaaaaaaaaaaaaaaaaaaaaaaaaaaaaaaaaaaaaaaaaaaaaaaaaaaaaaaaaaaaaaaaaaaaaaaaaaaaaaaaaaaaaaaaaaaaaaaaaaaaaaaaaaaaaaaaaaaaaaaaaaaaaaaaaaaaaaaaaaaaaaaaaaaaaaaaaaaaaaaaaaaaaaaaaaaaaaaaaaaaaaaaaaaaaaaaaaaaaaaaaaaaaaaaaaaaaaaaaaaaaaaaaaaaaaaaaaaaaaaaaaaaaaaaaaaaaaaaaaaaaaaaaaaaaaaaaaaaaaaaaaaaaaaaaaaaaaaaaaaaaaaaaaaaaaaaaaaaaaaaaaaaaaaaaaaaaaaaaaaaaaaaaaaaaaaaaaaaaaaaaaaaaaaaaaaaaaaaaaaaaaaaaaaaaaaaaaaaaaaaaaaaaaaaaaaaaaaaaaaaaaaaaaaaaaaaaaaaaaaaaaaaaaaaaaaaaaaaaaaaaaaaaaaaaaaaaaaaaaaaaaaaaaaaaaaaaaaaaaaaaaaaaaaaaaaaaaaaaaaaaaaaaaaaaaaaaaaaaaaaaaaaaaaaaaaaaaaaaaaaaaaaaaaaaaaaaaaaaaaaaaaaaaaaaaaaaaaaaaaaaaaaaaaaaaaaaaaaaaaaaaaaaaaaaaaaaaaaaaaaaaaaaaaaaaaaaaaaaaaaaaaaaaaaaaaaaaaaaaaaaaaaaaaaaaaaaaaaaaaaaaaaaaaaaaaaaaaaaaaaaaaaaaaaaaaaaaaaaaaaaaaaaaaaaaaaaaaaaaaaaaaaaaaaaaaaaaaaaaaaaaaaaaaaaaaaaaaaaaaaaaaaaaaaaaaaaaaaaaaaaaaaaaaaaaaaaaaaaaaaaaaaaaaaaaaaaaaaaaaaaaaaaaaaaaaaaaaaaaaaaaaaaaaaaaaaaaaaaaaaaaaaaaaaaaaaaaaaaaaaaaaaaaaaaaaaaaaaaaaaaaaaaaaaaaaaaaaaaaaaaaaaaaaaaaaaaaaaaaaaaaaaaaaaaaaaaaaaaaaaaaaaaaaaaaaaaaaaaaaaaaaaaaaaaaaaaaaaaaaaaaaaaaaaaaaaaaaaaaaaaaaaaaaaaaaaaaaaaaaaaaaaaaaaaaaaaaaaaaaaaaaaaaaaaaaaaaaaaaaaaaaaaaaaaaaaaaaaaaaaaaaaaaaaaaaaaaaaaaaaaaaaaaaaaaaaaaaaaaaaaaaaaaaaaaaaaaaaaaaaaaaaaaaaaaaaaaaaaaaaaaaaaaaaaaaaaaaaaaaaaaaaaaaaaaaaaaaaaaaaaaaaaaaaaaaaaaaaaaaaaaaaaaaaaaaaaaaaaaaaaaaaaaaaaaaaaaaaaaaaaaaaaaaaaaaaaaaaaaaaaaaaaaaaaaaaaaaaaaaaaaaaaaaaaaaaaaaaaaaaaaaaaaaaaaaaaaaaaaaaaaaaaaaaaaaaaaaaaaaaaaaaaaaaaaaaaaaaaaaaaaaaaaaaaaaaaaaaaaaaaaaaaaaaaaaaaaaaaaaaaaaaaaaaaaaaaaaaaaaaaaaaaaaaaaaaaaaaaaaaaaaaaaaaaaaaaaaaaaaaaaaaaaaaaaaaaaaaaaaaaaaaaaaaaaaaaaaaaaaaaaaaaaaaaaaaaaaaaaaaaaaaaaaaaaaaaaaaaaaaaaaaaaaaaaaaaaaaaaaaaaaaaaaaaaaaaaaaaaaaaaaaaaaaaaaaaaaaaaaaaaaaaaaaaaaaaaaaaaaaaaaaaaaaaaaaaaaaaaaaaaaaaaaaaaaaaaaaaaaaaaaaaaaaaaaaaaaaaaaaaaaaaaaaaaaaaaaaaaaaaaaaaaaaaaaaaaaaaaaaaaaaaaaaaaaaaaaaaaaaaaaaaaaaaaaaaaaaaaaaaaaaaaaaaaaaaaaaaaaaaaaaaaaaaaaaaaaaaaaaaaaaaaaaaaaaaaaaaaaaaaaaaaaaaaaaaaaaaaaaaaaaaaaaaaaaaaaaaaaaaaaaaaaaaaaaaaaaaaaaaaaaaaaaaaaaaaaaaaaaaaaaaaaaaaaaaaaaaaaaaaaaaaaaaaaaaaaaaaaaaaaaaaaaaaaaaaaaaaaaaaaaaaaaaaaaaaaaaaaaaaaaaaaaaaaaaaaaaaaaaaaaaaaaaaaaaaaaaaaaaaaaaaaaaaaaaaaaaaaaaaaaaaaaaaaaaaaaaaaaaaaaaaaaaaaaaaaaaaaaaaaaaaaaaaaaaaaaaaaaaaaaaaaaaaaaaaaaaaaaaaaaaaaaaaaaaaaaaaaaaaaaaaaaaaaaaaaaaaaaaaaaaaaaaaaaaaaaaaaaaaaaaaaaaaaaaaaaaaaaaaaaaaaaaaaaaaaaaaaaaaaaaaaaaaaaaaaaaaaaaaaaaaaaaaaaaaaaaaaaaaaaaaaaaaaaaaaaaaaaaaaaaaaaaaaaaaaaaaaaaaaaaaaaaaaaaaaaaaaaaaaaaaaaaaaaaaaaaaaaaaaaaaaaaaaaaaaaaaaaaaaaaaaaaaaaaaaaaaaaaaaaaaaaaaaaaaaaaaaaaaaaaaaaaaaaaaaaaaaaaaaaaaaaaaaaaaaaaaaaaaaaaaaaaaaaaaaaaaaaaaaaaaaaaaaaaaaaaaaaaaaaaaaaaaaaaaaaaaaaaaaaaaaaaaaaaaaaaaaaaaaaaaaaaaaaaaaaaaaaaaaaaaaaaaaaaaaaaaaaaaaaaaaaaaaaaaaaaaaaaaaaaaaaaaaaaaaaaaaaaaaaaaaaaaaaaaaaaaaaaaaaaaaaaaaaaaaaaaaaaaaaaaaaaaaaaaaaaaaaaaaaaaaaaaaaaaaaaaaaaaaaaaaaaaaaaaaaaaaaaaaaaaaaaaaaaaaaaaaaaaaaaaaaaaaaaaaaaaaaaaaaaaaaaaaaaaaaaaaaaaaaaaaaaaaaaaaaaaaaaaaaaaaaaaaaaaaaaaaaaaaaaaaaaaaaaaaaaaaaaaaaaaaaaaaaaaaaaaaaaaaaaaaaaaaaaaaaaaaaaaaaaaaaaaaaaaaaaaaaaaaaaaaaaaaaaaaaaaaaaaaaaaaaaaaaaaaaaaaaaaaaaaaaaaaaaaaaaaaaaaaaaaaaaaaaaaaaaaaaaaaaaaaaaaaaaaaaaaaaaaaaaaaaaaaaaaaaaaaaaaaaaaaaaaaaaaaaaaaaaaaaaaaaaaaaaaaaaaaaaaaaaaaaaaaaaaaaaaaaaaaaaaaaaaaaaaaaaaaaaaaaaaaaaaaaaaaaaaaaaaaaaaaaaaaaaaaaaaaaaaaaaaaaaaaaaaaaaaaaaaaaaaaaaaaaaaaaaaaaaaaaaaaaaaaaaaaaaaaaaaaaaaaaaaaaaaaaaaaaaaaaaaaaaaaaaaaaaaaaaaaaaaaaaaaaaaaaaaaaaaaaaaaaaaaaaaaaaaaaaaaaaaaaaaaaaaaaaaaaaaaaaaaaaaaaaaaaaaaaaaaaaaaaaaaaaaaaaaaaaaaaaaaaaaaaaaaaaaaaaaaaaaaaaaaaaaaaaaaaaaaaaaaaaaaaaaaaaaaaaaaaaaaaaaaaaaaaaaaaaaaaaaaaaaaaaaaaaaaaaaaaaaaaaaaaaaaaaaaaaaaaaaaaaaaaaaaaaaaaaaaaaaaaaaaaaaaaaaaaaaaaaaaaaaaaaaaaaaaaaaaaaaaaaaaaaaaaaaaaaaaaaaaaaaaaaaaaaaaaaaaaaaaaaaaaaaaaaaaaaaaaaaaaaaaaaaaaaaaaaaaaaaaaaaaaaaaaaaaaaaaaaaaaaaaaaaaaaaaaaaaaaaaaaaaaaaaaaaaaaaaaaaaaaaaaaaaaaaaaaaaaaaaaaaaaaaaaaaaaaaaaaaaaaaaaaaaaaaaaaaaaaaaaaaaaaaaaaaaaaaaaaaaaaaaaaaaaaaaaaaaaaaaaaaaaaaaaaaaaaaaaaaaaaaaaaaaaaaaaaaaaaaaaaaaaaaaaaaaaaaaaaaaaaaaaaaaaaaaaaaaaaaaaaaaaaaaaaaaaaaaaaaaaaaaaaaaaaaaaaaaaaaaaaaaaaaaaaaaaaaaaaaaaaaaaaaaaaaaaaaaaaaaaaaaaaaaaaaaaaaaaaaaaaaaaaaaaaaaaaaaaaaaaaaaaaaaaaaaaaaaaaaaaaaaaaaaaaaaaaaaaaaaaaaaaaaaaaaaaaaaaaaaaaaaaaaaaaaaaaaaaaaaaaaaaaaaaaaaaaaaaaaaaaaaaaaaaaaaaaaaaaaaaaaaaaaaaaaaaaaaaaaaaaaaaaaaaaaaaaaaaaaaaaaaaaaaaaaaaaaaaaaaaaaaaaaaaaaaaaaaaaaaaaaaaaaaaaaaaaaaaaaaaaaaaaaaaaaaaaaaaaaaaaaaaaaaaaaaaaaaaaaaaaaaaaaaaaaaaaaaaaaaaaaaaaaaaaaaaaaaaaaaaaaaaaaaaaaaaaaaaaaaaaaaaaaaaaaaaaaaaaaaaaaaaaaaaaaaaaaaaaaaaaaaaaaaaaaaaaaaaaaaaaaaaaaaaaaaaaaaaaaaaaaaaaaaaaaaaaaaaaaaaaaaaaaaaaaaaaaaaaaaaaaaaaaaaaaaaaaaaaaaaaaaaaaaaaaaaaaaaaaaaaaaaaaaaaaaaaaaaaaaaaaaaaaaaaaaaaaaaaaaaaaaaaaaaaaaaaaaaaaaaaaaaaaaaaaaaaaaaaaaaaaaaaaaaaaaaaaaaaaaaaaaaaaaaaaaaaaaaaaaaaaaaaaaaaaaaaaaaaaaaaaaaaaaaaaaaaaaaaaaaaaaaaaaaaaaaaaaaaaaaaaaaaaaaaaaaaaaaaaaaaaaaaaaaaaaaaaaaaaaaaaaaaaaaaaaaaaaaaaaaaaaaaaaaaaaaaaaaaaaaaaaaaaaaaaaaaaaaaaaaaaaaaaaaaaaaaaaaaaaaaaaaaaaaaaaaaaaaaaaaaaaaaaaaaaaaaaaaaaaaaaaaaaaaaaaaaaaaaaaaaaaaaaaaaaaaaaaaaaaaaaaaaaaaaaaaaaaaaaaaaaaaaaaaaaaaaaaaaaaaaaaaaaaaaaaaaaaaaaaaaaaaaaaaaaaaaaaaaaaaaaaaaaaaaaaaa

SEQ ID NO: 35 - DNA, 100 bp, Artificial Sequence
  source: /note="Description of Artificial Sequence: Synthetic polynucleotide"
tttttttttttttttttttttttttttttttttttttttttttttttttttttttttttttttttttttttttttttttttttttttttttttttttttt

SEQ ID NO: 36 - DNA, 500 bp, Artificial Sequence
  source: /note="Description of Artificial Sequence: Synthetic polynucleotide"
tttttttttttttttttttttttttttttttttttttttttttttttttttttttttttttttttttttttttttttttttttttttttttttttttttttttttttttttttttttttttttttttttttttttttttttttttttttttttttttttttttttttttttttttttttttttttttttttttttttttttttttttttttttttttttttttttttttttttttttttttttttttttttttttttttttttttttttttttttttttttttttttttttttttttttttttttttttttttttttttttttttttttttttttttttttttttttttttttttttttttttttttttttttttttttttttttttttttttttttttttttttttttttttttttttttttttttttttttttttttttttttttttttttttttttttttttttttttttttttttttttttttttttttttttttt

SEQ ID NO: 37 - DNA, 64 bp, Artificial Sequence
  source: /note="Description of Artificial Sequence: Synthetic oligonucleotide"
aaaaaaaaaaaaaaaaaaaaaaaaaaaaaaaaaaaaaaaaaaaaaaaaaaaaaaaaaaaaaaaa

SEQ ID NO: 38 - DNA, 400 bp, Artificial Sequence
  source: /note="Description of Artificial Sequence: Synthetic polynucleotide"
  misc_feature (1)..(400): /note="This sequence may encompass 100-400 nucleotides"
aaaaaaaaaaaaaaaaaaaaaaaaaaaaaaaaaaaaaaaaaaaaaaaaaaaaaaaaaaaaaaaaaaaaaaaaaaaaaaaaaaaaaaaaaaaaaaaaaaaaaaaaaaaaaaaaaaaaaaaaaaaaaaaaaaaaaaaaaaaaaaaaaaaaaaaaaaaaaaaaaaaaaaaaaaaaaaaaaaaaaaaaaaaaaaaaaaaaaaaaaaaaaaaaaaaaaaaaaaaaaaaaaaaaaaaaaaaaaaaaaaaaaaaaaaaaaaaaaaaaaaaaaaaaaaaaaaaaaaaaaaaaaaaaaaaaaaaaaaaaaaaaaaaaaaaaaaaaaaaaaaaaaaaaaaaaaaaaaaaaaaaaaaaaaaaaaaaaaaaaaaaaaaaaaaaaaaaaaaaaaaaaaaaaaaaaaaaaaaaa

SEQ ID NO: 39 - protein, 373 aa, Artificial Sequence
  source: /note="Description of Artificial Sequence: Synthetic polypeptide"
PGWFLDSPDRPWNPPTFSPALLVVTEGDNATFTCSFSNTSESFVLNWYRMSPSNQTDKLAAFPEDRSQPGQDCRFRVTQLPNGRDFHMSVVRARRNDSGTYLCGAISLAPKAQIKESLRAELRVTERRAEVPTAHPSPSPRPAGQFQTLVTTTPAPRPPTPAPTIASQPLSLRPEACRPAAGGAVHTRGLDFACDIYIWAPLAGTCGVLLLSLVITLYCKRGRKKLLYIFKQPFMRPVQTTQEEDGCSCRFPEEEEGGCELRVKFSRSADAPAYKQGQNQLYNELNLGRREEYDVLDKRRGRDPEMGGKPRRKNPQEGLYNELQKDKMAEAYSEIGMKGERRRGKGHDGLYQGLSTATKDTYDALHMQALPPR

SEQ ID NO: 40 - protein, 35 aa, Artificial Sequence
  source: /note="Description of Artificial Sequence: Synthetic polypeptide"
TKKKYSSSVHDPNGEYMFMRAVNTAKKSRLTDVTL

SEQ ID NO: 41 - DNA, 105 bp, Artificial Sequence
  source: /note="Description of Artificial Sequence: Synthetic polynucleotide"
acaaaaaagaagtattcatccagtgtgcacgaccctaacggtgaatacatgttcatgagagcagtgaacacagccaaaaaatccagactcacagatgtgacccta

SEQ ID NO: 42 - protein, 69 aa, Artificial Sequence
  source: /note="Description of Artificial Sequence: Synthetic polypeptide"
TTTPAPRPPTPAPTIASQPLSLRPEACRPAAGGAVHTRGLDFACDFWLPIGCAAFVVVCILGCILICWL

SEQ ID NO: 43 - DNA, 207 bp, Artificial Sequence
  source: /note="Description of Artificial Sequence: Synthetic polynucleotide"
accacgacgccagcgccgcgaccaccaacaccggcgcccaccatcgcgtcgcagcccctgtccctgcgcccagaggcgtgccggccagcggcggggggcgcagtgcacacgagggggctggacttcgcctgtgatttctggttacccataggatgtgcagcctttgttgtagtctgcattttgggatgcatacttatttgttggctt

SEQ ID NO: 44 - protein, 41 aa, Artificial Sequence
  source: /note="Description of Artificial Sequence: Synthetic polypeptide"
RSKRSRLLHSDYMNMTPRRPGPTRKHYQPYAPPRDFAAYRS

SEQ ID NO: 45 - DNA, 123 bp, Artificial Sequence; identical to SEQ ID NO: 17
  source: /note="Description of Artificial Sequence: Synthetic polynucleotide"

SEQ ID NO: 46 - protein, 239 aa, Artificial Sequence
  source: /note="Description of Artificial Sequence: Synthetic polypeptide"
QVQLQQSGPELEKPGASVKISCKASGYSFTGYTMNWVKQSHGKSLEWIGLITPYNGASSYNQKFRGKATLTVDKSSSTAYMDLLSLTSEDSAVYFCARGGYDGRGFDYWGQGTTVTVSSGGGGSGGGGSGGGGSDIELTQSPAIMSASPGEKVTMTCSASSSVSYMHWYQQKSGTSPKRWIYDTSKLASGVPGRFSGSGSGNSYSLTISSVEAEDDATYYCQQWSGYPLTFGAGTKLEI

SEQ ID NO: 47 - protein, 244 aa, Artificial Sequence
  source: /note="Description of Artificial Sequence: Synthetic polypeptide"
QVQLQQSGAEVKKPGASVKVSCKASGYTFTGYYMHWVRQAPGQGLEWMGRINPNSGGTNYAQKFQGRVTMTRDTSISTAYMELSRLRSEDTAVYYCARGRYYGMDVWGQGTMVTVSSGGGGSGGGGSGGGGSGGGGSEIVLTQSPATLSLSPGERATISCRASQSVSSNFAWYQQRPGQAPRLLIYDASNRATGIPPRFSGSGSGTDFTLTISSLEPEDFAAYYCHQRSNWLYTFGQGTKVDIK

SEQ ID NO: 48 - protein, 253 aa, Artificial Sequence
  source: /note="Description of Artificial Sequence: Synthetic polypeptide"
QVQLVQSGAEVKKPGASVKVSCKASGYTFTGYYMHWVRQAPGQGLEWMGWINPNSGGTNYAQKFQGRVTMTRDTSISTAYMELSRLRSDDTAVYYCARDLRRTVVTPRAYYGMDVWGQGTTVTVSSGGGGSGGGGSGGGGSGGGGSDIQLTQSPSTLSASVGDRVTITCQASQDISNSLNWYQQKAGKAPKLLIYDASTLETGVPSRFSGSGSGTDFSFTISSLQPEDIATYYCQQHDNLPLTFGQGTKVEIK

SEQ ID NO: 49 - protein, 246 aa, Artificial Sequence
  source: /note="Description of Artificial Sequence: Synthetic polypeptide"
QVQLVQSGAEVKKPGAPVKVSCKASGYTFTGYYMHWVRQAPGQGLEWMGWINPNSGGTNYAQKFQGRVTMTRDTSISTAYMELSRLRSDDTAVYYCARGEWDGSYYYDYWGQGTLVTVSSGGGGSGGGGSGGGGSGGGGSDIVLTQTPSSLSASVGDRVTITCRASQSINTYLNWYQHKPGKAPKLLIYAASSLQSGVPSRFSGSGSGTDFTLTISSLQPEDFATYYCQQSFSPLTFGGGTKLEIK

SEQ ID NO: 50 - protein, 242 aa, Artificial Sequence
  source: /note="Description of Artificial Sequence: Synthetic polypeptide"
QVQLVESGGGLVQPGGSLRLSCAASGFTFSSYWMHWVRQVPGKGLVWVSRINTDGSTTTYADSVEGRFTISRDNAKNTLYLQMNSLRDDDTAVYYCVGGHWAVWGQGTTVTVSSGGGGSGGGGSGGGGSGGGGSDIQMTQSPSTLSASVGDRVTITCRASQSISDRLAWYQQKPGKAPKLLIYKASSLESGVPSRFSGSGSGTEFTLTISSLQPDDFAVYYCQQYGHLPMYTFGQGTKVEIK

SEQ ID NO: 51 - protein, 241 aa, Artificial Sequence
  source: /note="Description of Artificial Sequence: Synthetic polypeptide"
QVQLVQSGAEVEKPGASVKVSCKASGYTFTDYYMHWVRQAPGQGLEWMGWINPNSGGTNYAQKFQGRVTMTRDTSISTAYMELSRLRSDDTAVYYCASGWDFDYWGQGTLVTVSSGGGGSGGGGSGGGGSGGGGSDIVMTQSPSSLSASVGDRVTITCRASQSIRYYLSWYQQKPGKAPKLLIYTASILQNGVPSRFSGSGSGTDFTLTISSLQPEDFATYYCLQTYTTPDFGPGTKVEIK

SEQ ID NO: 52 - protein, 252 aa, Artificial Sequence
  source: /note="Description of Artificial Sequence: Synthetic polypeptide"
QVQLVQSGAEVKKPGASVKVSCKASGYTFTSYYMHWVRQAPGQGLEWMGIINPSGGSTSYAQKFQGRVTMTRDTSTSTVYMELSSLRSEDTAVYYCARYRLIAVAGDYYYYGMDVWGQGTMVTVSSGGGGSGGGGSGGGGSGGGGSDIQMTQSPSSVASVGDRVTITCRASQGVGRWLAWYQQKPGTAPKLLIYAASTLQSGVPSRFSGSGSGTDFTLTINNLQPEDFATYYCQQANSFPLTFGGGTRLEIK

SEQ ID NO: 53 - protein, 250 aa, Artificial Sequence
  source: /note="Description of Artificial Sequence: Synthetic polypeptide"
QVQLVQSGGGVVQPGRSLRLSCAASGFTFSSYAMHWVRQAPGKGLEWVAVISYDGSNKYYADSVKGRFTISRDNSKNTLYLQMNSLRAEDTAVYYCARWKVSSSSPAFDYWGQGTLVTVSSGGGGSGGGGSGGGGSGGGGSEIVLTQSPATLSLSPGERAILSCRASQSVYTKYLGWYQQKPGQAPRLLIYDASTRATGIPDRFSGSGSGTDFTLTINRLEPEDFAVYYCQHYGGSPLITFGQGTRLEIK

SEQ ID NO: 54 - protein, 246 aa, Artificial Sequence
  source: /note="Description of Artificial Sequence: Synthetic polypeptide"
QVQLQQSGAEVKKPGASVKVSCKTSGYPFTGYSLHWVRQAPGQGLEWMGWINPNSGGTNYAQKFQGRVTMTRDTSISTAYMELSRLRSDDTAVYYCARDHYGGNSLFYWGQGTLVTVSSGGGGSGGGGSGGGGSGGGGSDIQLTQSPSSISASVGDTVSITCRASQDSGTWLAWYQQKPGKAPNLLMYDASTLEDGVPSRFSGSASGTEFTLTVNRLQPEDSATYYCQQYNSYPLTFGGGTKVDIK

SEQ ID NO: 55 - protein, 248 aa, Artificial Sequence
  source: /note="Description of Artificial Sequence: Synthetic polypeptide"
QVQLVQSGAEVKKPGASVEVSCKASGYTFTSYYMHWVRQAPGQGLEWMGIINPSGGSTGYAQKFQGRVTMTRDTSTSTVHMELSSLRSEDTAVYYCARGGYSSSSDAFDIWGQGTMVTVSSGGGGSGGGGSGGGGSGGGGSDIQMTQSPPSLSASVGDRVTITCRASQDISSALAWYQQKPGTPPKLLIYDASSLESGVPSRFSGSGSGTDFTLTISSLQPEDFATYYCQQFSSYPLTFGGGTRLEIK

SEQ ID NO: 56 - protein, 255 aa, Artificial Sequence
  source: /note="Description of Artificial Sequence: Synthetic polypeptide"
QVQLVQSGAEVKKPGASVKVSCKASGYTFTSYGISWVRQAPGQGLEWMGWISAYNGNTNYAQKLQGRVTMTTDTSTSTAYMELRSLRSDDTAVYYCARVAGGIYYYYGMDVWGQGTTITVSSGGGGSGGGGSGGGGSGGGGSDIVMTQTPDSLAVSLGERATISCKSSHSVLYNRNNKNYLAWYQQKPGQPPKLLFYWASTRKSGVPDRFSGSGSGTDFTLTISSLQPEDFATYFCQQTQTFPLTFGQGTRLEIN

SEQ ID NO: 57 - protein, 241 aa, Artificial Sequence
  source: /note="Description of Artificial Sequence: Synthetic polypeptide"
QVQLQQSGAEVKKPGASVKVSCKASGYTFTGYYMHWVRQAPGQGLEWMGWINPNSGGTNYAQNFQGRVTMTRDTSISTAYMELRRLRSDDTAVYYCASGWDFDYWGQGTLVTVSSGGGGSGGGGSGGGGSGGGGSDIRMTQSPSSLSASVGDRVTITCRASQSIRYYLSWYQQKPGKAPKLLIYTASILQNGVPSRFSGSGSGTDFTLTISSLQPEDFATYYCLQTYTTPDFGPGTKVEIK

SEQ ID NO: 58 - protein, 246 aa, Artificial Sequence
  source: /note="Description of Artificial Sequence: Synthetic polypeptide"
QVQLVQSGAEVKKPGASVKVSCKASGYTFTGYYMHWVRQAPGQGLEWMGRINPNSGGTNYAQKFQGRVTMTTDTSTSTAYMELRSLRSDDTAVYYCARTTTSYAFDIWGQGTMVTVSSGGGGSGGGGSGGGGSGGGGSDIQLTQSPSTLSASVGDRVTITCRASQSISTWLAWYQQKPGKAPNLLIYKASTLESGVPSRFSGSGSGTEFTLTISSLQPDDFATYYCQQYNTYSPYTFGQGTKLEIK

SEQ ID NO: 59 - protein, 249 aa, Artificial Sequence
  source: /note="Description of Artificial Sequence: Synthetic polypeptide"
QVQLVQSGGGLVKPGGSLRLSCEASGFIFSDYYMGWIRQAPGKGLEWVSYIGRSGSSMYYADSVKGRFTFSRDNAKNSLYLQMNSLRAEDTAVYYCAASPVVAATEDFQHWGQGTLVTVSSGGGGSGGGGSGGGGSGGGGSDIVMTQTPATLSLSPGERATLSCRASQSVTSNYLAWYQQKPGQAPRLLLFGASTRATGIPDRFSGSGSGTDFTLTINRLEPEDFAMYYCQQYGSAPVTFGQGTKLEIK

SEQ ID NO: 60 - protein, 249 aa, Artificial Sequence
  source: /note="Description of Artificial Sequence: Synthetic polypeptide"
QVQLVQSGAEVRAPGASVKISCKASGFTFRGYYIHWVRQAPGQGLEWMGIINPSGGSRAYAQKFQGRVTMTRDTSTSTVYMELSSLRSDDTAMYYCARTASCGGDCYYLDYWGQGTLVTVSSGGGGSGGGGSGGGGSGGGGSDIQMTQSPPTLSASVGDRVTITCRASENVNIWLAWYQQKPGKAPKLLIYKSSSLASGVPSRFSGSGSGAEFTLTISSLQPDDFATYYCQQYQSYPLTFGGGTKVDIK

SEQ ID NO: 61 - protein, 244 aa, Artificial Sequence
  source: /note="Description of Artificial Sequence: Synthetic polypeptide"
QVQLVQSGGGLVQPGRSLRLSCAASGFTFDDYAMHWVRQAPGKGLEWVSGISWNSGSIGYADSVKGRFTISRDNAKNSLYLQMNSLRAEDTAVYYCAKDGSSSWSWGYFDYWGQGTLVTVSSGGGGSGGGGSGGGGSSSELTQDPAVSVALGQTVRTTCQGDALRSYYASWYQQKPGQAPMLVIYGKNNRPSGIPDRFSGSDSGDTASLTITGAQAEDEADYYCNSRDSSGYPVFGTGTKVTVL

SEQ ID NO: 62 - protein, 246 aa, Artificial Sequence
  source: /note="Description of Artificial Sequence: Synthetic polypeptide"
EVQLVESGGGLVQPGRSLRLSCAASGFTFDDYAMHWVRQAPGKGLEWVSGISWNSGSTGYADSVKGRFTISRDNAKNSLYLQMNSLRAEDTALYYCAKDSSSWYGGGSAFDIWGQGTMVTVSSGGGGSGGGGSGGGGSSSELTQEPAVSVALGQTVRITCQGDSLRSYYASWYQQKPGQAPVLVIFGRSRRPSGIPDRFSGSSSGNTASLIITGAQAEDEADYYCNSRDNTANHYVFGTGTKLTVL

SEQ ID NO: 63 - protein, 246 aa, Artificial Sequence
  source: /note="Description of Artificial Sequence: Synthetic polypeptide"
EVQLVESGGGLVQPGRSLRLSCAASGFTFDDYAMHWVRQAPGKGLEWVSGISWNSGSTGYADSVKGRFTISRDNAKNSLYLQMNSLRAEDTALYYCAKDSSSWYGGGSAFDIWGQGTMVTVSSGGGGSGGGGSGGGGSSSELTQDPAVSVALGQTVRITCQGDSLRSYYASWYQQKPGQAPVLVIYGKNNRPSGIPDRFSGSSSGNTASLTITGAQAEDEADYYCNSRGSSGNHYVFGTGTKVTVL

SEQ ID NO: 64 - protein, 251 aa, Artificial Sequence
  source: /note="Description of Artificial Sequence: Synthetic polypeptide"
QVQLVQSGGGLVQPGGSLRLSCAASGFTFSSYWMHWVRQAPGKGLVWVSRINSDGSSTSYADSVKGRFTISRDNAKNTLYLQMNSLRAEDTAVYYCVRTGWVGSYYYYMDVWGKGTTVTVSSGGGGSGGGGSGGGGSGGGGSEIVLTQSPGTLSLSPGERATLSCRASQSVSSNYLAWYQQKPGQPPRLLIYDVSTRATGIPARFSGGGSGTDFTLTISSLEPEDFAVYYCQQRSNWPPWTFGQGTKVEIK

SEQ ID NO: 65 - protein, 250 aa, Artificial Sequence
  source: /note="Description of Artificial Sequence: Synthetic polypeptide"
QVQLVQSGGGVVQPGRSLRLSCAASGFTFSSYGMHWVRQAPGKGLEWVAVISYDGSNKYYADSVKGRFTISRDNSKNTLYLQMNSLRAEDTAVYYCAKGYSRYYYYGMDVWGQGTTVTVSSGGGGSGGGGSGGGGSGGGGSEIVMTQSPATLSLSPGERAILSCRASQSVYTKYLGWYQQKPGQAPRLLIYDASTRATGIPDRFSGSGSGTDFTLTINRLEPEDFAVYYCQHYGGSPLITFGQGTKVDIK

SEQ ID NO: 66 - protein, 249 aa, Artificial Sequence
  source: /note="Description of Artificial Sequence: Synthetic polypeptide"
QVQLVQSGGGLVQPGGSLRLSCAASGFTFSSYAMSWVRQAPGKGLEWVSAISGSGGSTYYADSVKGRFTISRDNSKNTLYLQMNSLRAEDTAVYYCAKREAAAGHDWYFDLWGRGTLVTVSSGGGGSGGGGSGGGGSGGGGSDIRVTQSPSSLSASVGDRVTITCRASQSISSYLNWYQQKPGKAPKLLIYAASSLQSGVPSRFSGSGSGTDFTLTISSLQPEDFATYYCQQSYSIPLTFGQGTKVEIK

SEQ ID NO: 67 - protein, 247 aa, Artificial Sequence
  source: /note="Description of Artificial Sequence: Synthetic polypeptide"
QVQLVQSWAEVKKPGASVKVSCKASGYTFTSYYMHWVRQAPGQGLEWMGIINPSGGSTSYAQKFQGRVTMTRDTSTSTVYMELSNLRSEDTAVYYCARSPRVTTGYFDYWGQGTLVTVSSGGGGSGGGGSGGGGSGGGGSDIQLTQSPSTLSASVGDRVTITCRASQSISSWLAWYQQKPGKAPKLLIYKASSLESGVPSRFSGSGSGTEFTLTISSLQPDDFATYYCQQYSSYPLTFGGGTRLEIK

SEQ ID NO: 68 - protein, 253 aa, Artificial Sequence
  source: /note="Description of Artificial Sequence: Synthetic polypeptide"
QVQLVQSGAEVRRPGASVKISCRASGDTSTRHYIHWLRQAPGQGPEWMGVINPTTGPATGSPAYAQMLQGRVTMTRDTSTRTVYMELRSLRFEDTAVYYCARSVVGRSAPYYFDYWGQGTLVTVSSGGGGSGGGGSGGGGSGGGGSDIQMTQSPSSLSASVGDRVTITCRASQGISDYSAWYQQKPGKAPKLLIYAASTLQSGVPSRFSGSGSGTDFTLTISYLQSEDFATYYCQQYYSYPLTFGGGTKVDIK

SEQ ID NO: 69 - protein, 249 aa, Artificial Sequence
  source: /note="Description of Artificial Sequence: Synthetic polypeptide"
QVQLQQSGAEVKKPGASVKVSCKASGYTFTNYYMHWVRQAPGQGLEWMGIINPSGGYTTYAQKFQGRLTMTRDTSTSTVYMELSSLRSEDTAVYYCARIRSCGGDCYYFDNWGQGTLVTVSSGGGGSGGGGSGGGGSGGGGSDIQLTQSPSTLSASVGDRVTITCRASENVNIWLAWYQQKPGKAPKLLIYKSSSLASGVPSRFSGSGSGAEFTLTISSLQPDDFATYYCQQYQSYPLTFGGGTKVDIK

SEQ ID NO: 70 - protein, 246 aa, Artificial Sequence
  source: /note="Description of Artificial Sequence: Synthetic polypeptide"
QITLKESGPALVKPTQTLTLTCTFSGFSLSTAGVHVGWIRQPPGKALEWLALISWADDKRYRPSLRSRLDITRVTSKDQVVLSMTNMQPEDTATYYCALQGFDGYEANWGPGTLVTVSSGGGGSGGGGSGGGGSGGGGSDIVMTQSPSSLSASAGDRVTITCRASRGISSALAWYQQKPGKPPKLLIYDASSLESGVPSRFSGSGSGTDFTLTIDSLEPEDFATYYCQQSYSTPWTFGQGTKVDIK

SEQ ID NO: 71 - protein, 246 aa, Artificial Sequence
  source: /note="Description of Artificial Sequence: Synthetic polypeptide"
EIQLVQSGAEVKKPGATVKISCKGSGFNIEDYYIHWVQQAPGKGLEWMGRIDPENDETKYGPIFQGRVTITADTSTNTVYMELSSLRSEDTAVYYCAFRGGVYWGQGTTVTVSSGGGGSGGGGSGGGGSGGGGSDVVMTQSPDSLAVSLGERATINCKSSQSLLDSDGKTYLNWLQQKPGQPPKRLISLVSKLDSGVPDRFSGSGSGTDFTLTISSLQAEDVAVYYCWQGTHFPGTFGGGTKVEIK

SEQ ID NO: 72 - protein, 246 aa, Artificial Sequence
  source: /note="Description of Artificial Sequence: Synthetic polypeptide"
DVVMTQSPDSLAVSLGERATINCKSSQSLLDSDGKTYLNWLQQKPGQPPKRLISLVSKLDSGVPDRFSGSGSGTDFTLTISSLQAEDVAVYYCWQGTHFPGTFGGGTKVEIKGGGGSGGGGSGGGGSGGGGSEIQLVQSGAEVKKPGATVKISCKGSGFNIEDYYIHWVQQAPGKGLEWMGRIDPENDETKYGPIFQGRVTITADTSTNTVYMELSSLRSEDTAVYYCAFRGGVYWGQGTTVTVSS

SEQ ID NO: 73 - protein, 246 aa, Artificial Sequence
  source: /note="Description of Artificial Sequence: Synthetic polypeptide"
EIQLVQSGAEVKKPGESLRISCKGSGFNIEDYYIHWVRQMPGKGLEWMGRIDPENDETKYGPIFQGHVTISADTSINTVYLQWSSLKASDTAMYYCAFRGGVYWGQGTTVTVSSGGGGSGGGGSGGGGSGGGGSDVVMTQSPLSLPVTLGQPASISCKSSQSLLDSDGKTYLNWLQQRPGQSPRRLISLVSKLDSGVPDRFSGSGSGTDFTLKISRVEAEDVGVYYCWQGTHFPGTFGGGTKVEIK

SEQ ID NO: 74 - protein, 246 aa, Artificial Sequence
  source: /note="Description of Artificial Sequence: Synthetic polypeptide"
DVVMTQSPLSLPVTLGQPASISCKSSQSLLDSDGKTYLNWLQQRPGQSPRRLISLVSKLDSGVPDRFSGSGSGTDFTLKISRVEAEDVGVYYCWQGTHFPGTFGGGTKVEIKGGGGSGGGGSGGGGSGGGGSEIQLVQSGAEVKKPGESLRISCKGSGFNIEDYYIHWVRQMPGKGLEWMGRIDPENDETKYGPIFQGHVTISADTSINTVYLQWSSLKASDTAMYYCAFRGGVYWGQGTTVTVSS

SEQ ID NO: 75 - protein, 246 aa, Artificial Sequence
  source: /note="Description of Artificial Sequence: Synthetic polypeptide"
EIQLVQSGAEVKKPGATVKISCKGSGFNIEDYYIHWVQQAPGKGLEWMGRIDPENDETKYGPIFQGRVTITADTSTNTVYMELSSLRSEDTAVYYCAFRGGVYWGQGTTVTVSSGGGGSGGGGSGGGGSGGGGSDVVMTQSPLSLPVTLGQPASISCKSSQSLLDSDGKTYLNWLQQRPGQSPRRLISLVSKLDSGVPDRFSGSGSGTDFTLKISRVEAEDVGVYYCWQGTHFPGTFGGGTKVEIK

SEQ ID NO: 76 - protein, 246 aa, Artificial Sequence
  source: /note="Description of Artificial Sequence: Synthetic polypeptide"
EIQLVQSGAEVKKPGESLRISCKGSGFNIEDYYIHWVRQMPGKGLEWMGRIDPENDETKYGPIFQGHVTISADTSINTVYLQWSSLKASDTAMYYCAFRGGVYWGQGTTVTVSSGGGGSGGGGSGGGGSGGGGSDVVMTQSPDSLAVSLGERATINCKSSQSLLDSDGKTYLNWLQQKPGQPPKRLISLVSKLDSGVPDRFSGSGSGTDFTLTISSLQAEDVAVYYCWQGTHFPGTFGGGTKVEIK

SEQ ID NO: 77 - protein, 246 aa, Artificial Sequence
  source: /note="Description of Artificial Sequence: Synthetic polypeptide"
DVVMTQSPDSLAVSLGERATINCKSSQSLLDSDGKTYLNWLQQKPGQPPKRLISLVSKLDSGVPDRFSGSGSGTDFTLTISSLQAEDVAVYYCWQGTHFPGTFGGGTKVEIKGGGGSGGGGSGGGGSGGGGSEIQLVQSGAEVKKPGESLRISCKGSGFNIEDYYIHWVRQMPGKGLEWMGRIDPENDETKYGPIFQGHVTISADTSINTVYLQWSSLKASDTAMYYCAFRGGVYWGQGTTVTVSS

SEQ ID NO: 78 - protein, 246 aa, Artificial Sequence
  source: /note="Description of Artificial Sequence: Synthetic polypeptide"
DVVMTQSPLSLPVTLGQPASISCKSSQSLLDSDGKTYLNWLQQRPGQSPRRLISLVSKLDSGVPDRFSGSGSGTDFTLKISRVEAEDVGVYYCWQGTHFPGTFGGGTKVEIKGGGGSGGGGSGGGGSGGGGSEIQLVQSGAEVKKPGATVKISCKGSGFNIEDYYIHWVQQAPGKGLEWMGRIDPENDETKYGPIFQGRVTITADTSTNTVYMELSSLRSEDTAVYYCAFRGGVYWGQGTTVTVSS

SEQ ID NO: 79 - protein, 243 aa, Artificial Sequence
  source: /note="Description of Artificial Sequence: Synthetic polypeptide"
EIQLQQSGAELVKPGASVKLSCTGSGFNIEDYYIHWVKQRTEQGLEWIGRIDPENDETKYGPIFQGRATITADTSSNTVYLQLSSLTSEDTAVYYCAFRGGVYWGPGTTLTVSSGGGGSGGGGSGGGGSHMDVVMTQSPLTLSVAIGQSASISCKSSQSLLDSDGKTYLNWLLQRPGQSPKRLISLVSKLDSGVPDRFTGSGSGTDFTLRISRVEAEDLGIYYCWQGTHFPGTFGGGTKLEIK

SEQ ID NO: 80 - protein, 30 aa, Artificial Sequence
  source: /note="Description of Artificial Sequence: Synthetic polypeptide"
  MISC_FEATURE (1)..(30): /note="This region may encompass 1-6 "Gly Gly Gly Gly Ser" repeating units"
GGGGSGGGGSGGGGSGGGGSGGGGSGGGGS

SEQ ID NO: 81 - protein, 18 aa, Artificial Sequence
  source: /note="Description of Artificial Sequence: Synthetic peptide"
GSTSGSGKPGSGEGSTKG

SEQ ID NO: 82 - skipped

SEQ ID NO: 83 - protein, 242 aa, Artificial Sequence
  source: /note="Description of Artificial Sequence: Synthetic polypeptide"
EIVMTQSPATLSLSPGERATLSCRASQDISKYLNWYQQKPGQAPRLLIYHTSRLHSGIPARFSGSGSGTDYTLTISSLQPEDFAVYFCQQGNTLPYTFGQGTKLEIKGGGGSGGGGSGGGGSQVQLQESGPGLVKPSETLSLTCTVSGVSLPDYGVSWIRQPPGKGLEWIGVIWGSETTYYSSSLKSRVTISKDNSKNQVSLKLSSVTAADTAVYYCAKHYYYGGSYAMDYWGQGTLVTVSS

SEQ ID NO: 84 - protein, 242 aa, Artificial Sequence
  source: /note="Description of Artificial Sequence: Synthetic polypeptide"
EIVMTQSPATLSLSPGERATLSCRASQDISKYLNWYQQKPGQAPRLLIYHTSRLHSGIPARFSGSGSGTDYTLTISSLQPEDFAVYFCQQGNTLPYTFGQGTKLEIKGGGGSGGGGSGGGGSQVQLQESGPGLVKPSETLSLTCTVSGVSLPDYGVSWIRQPPGKGLEWIGVIWGSETTYYQSSLKSRVTISKDNSKNQVSLKLSSVTAADTAVYYCAKHYYYGGSYAMDYWGQGTLVTVSS

SEQ ID NO: 85 - protein, 242 aa, Artificial Sequence
  source: /note="Description of Artificial Sequence: Synthetic polypeptide"
QVQLQESGPGLVKPSETLSLTCTVSGVSLPDYGVSWIRQPPGKGLEWIGVIWGSETTYYSSSLKSRVTISKDNSKNQVSLKLSSVTAADTAVYYCAKHYYYGGSYAMDYWGQGTLVTVSSGGGGSGGGGSGGGGSEIVMTQSPATLSLSPGERATLSCRASQDISKYLNWYQQKPGQAPRLLIYHTSRLHSGIPARFSGSGSGTDYTLTISSLQPEDFAVYFCQQGNTLPYTFGQGTKLEIK

SEQ ID NO: 86 - protein, 242 aa, Artificial Sequence
  source: /note="Description of Artificial Sequence: Synthetic polypeptide"
QVQLQESGPGLVKPSETLSLTCTVSGVSLPDYGVSWIRQPPGKGLEWIGVIWGSETTYYQSSLKSRVTISKDNSKNQVSLKLSSVTAADTAVYYCAKHYYYGGSYAMDYWGQGTLVTVSSGGGGSGGGGSGGGGSEIVMTQSPATLSLSPGERATLSCRASQDISKYLNWYQQKPGQAPRLLIYHTSRLHSGIPARFSGSGSGTDYTLTISSLQPEDFAVYFCQQGNTLPYTFGQGTKLEIK

SEQ ID NO: 87 - protein, 247 aa, Artificial Sequence
  source: /note="Description of Artificial Sequence: Synthetic polypeptide"
EIVMTQSPATLSLSPGERATLSCRASQDISKYLNWYQQKPGQAPRLLIYHTSRLHSGIPARFSGSGSGTDYTLTISSLQPEDFAVYFCQQGNTLPYTFGQGTKLEIKGGGGSGGGGSGGGGSGGGGSQVQLQESGPGLVKPSETLSLTCTVSGVSLPDYGVSWIRQPPGKGLEWIGVIWGSETTYYSSSLKSRVTISKDNSKNQVSLKLSSVTAADTAVYYCAKHYYYGGSYAMDYWGQGTLVTVSS

SEQ ID NO: 88 - protein, 247 aa, Artificial Sequence
  source: /note="Description of Artificial Sequence: Synthetic polypeptide"
EIVMTQSPATLSLSPGERATLSCRASQDISKYLNWYQQKPGQAPRLLIYHTSRLHSGIPARFSGSGSGTDYTLTISSLQPEDFAVYFCQQGNTLPYTFGQGTKLEIKGGGGSGGGGSGGGGSGGGGSQVQLQESGPGLVKPSETLSLTCTVSGVSLPDYGVSWIRQPPGKGLEWIGVIWGSETTYYQSSLKSRVTISKDNSKNQVSLKLSSVTAADTAVYYCAKHYYYGGSYAMDYWGQGTLVTVSS

SEQ ID NO: 89 - protein, 247 aa, Artificial Sequence
  source: /note="Description of Artificial Sequence: Synthetic polypeptide"
QVQLQESGPGLVKPSETLSLTCTVSGVSLPDYGVSWIRQPPGKGLEWIGVIWGSETTYYSSSLKSRVTISKDNSKNQVSLKLSSVTAADTAVYYCAKHYYYGGSYAMDYWGQGTLVTVSSGGGGSGGGGSGGGGSGGGGSEIVMTQSPATLSLSPGERATLSCRASQDISKYLNWYQQKPGQAPRLLIYHTSRLHSGIPARFSGSGSGTDYTLTISSLQPEDFAVYFCQQGNTLPYTFGQGTKLEIK

SEQ ID NO: 90 - protein, 247 aa, Artificial Sequence
  source: /note="Description of Artificial Sequence: Synthetic polypeptide"
QVQLQESGPGLVKPSETLSLTCTVSGVSLPDYGVSWIRQPPGKGLEWIGVIWGSETTYYQSSLKSRVTISKDNSKNQVSLKLSSVTAADTAVYYCAKHYYYGGSYAMDYWGQGTLVTVSSGGGGSGGGGSGGGGSGGGGSEIVMTQSPATLSLSPGERATLSCRASQDISKYLNWYQQKPGQAPRLLIYHTSRLHSGIPARFSGSGSGTDYTLTISSLQPEDFAVYFCQQGNTLPYTFGQGTKLEIK

SEQ ID NO: 91 - protein, 247 aa, Artificial Sequence
  source: /note="Description of Artificial Sequence: Synthetic polypeptide"
EIVMTQSPATLSLSPGERATLSCRASQDISKYLNWYQQKPGQAPRLLIYHTSRLHSGIPARFSGSGSGTDYTLTISSLQPEDFAVYFCQQGNTLPYTFGQGTKLEIKGGGGSGGGGSGGGGSGGGGSQVQLQESGPGLVKPSETLSLTCTVSGVSLPDYGVSWIRQPPGKGLEWIGVIWGSETTYYNSSLKSRVTISKDNSKNQVSLKLSSVTAADTAVYYCAKHYYYGGSYAMDYWGQGTLVTVSS

SEQ ID NO: 92 - protein, 247 aa, Artificial Sequence
  source: /note="Description of Artificial Sequence: Synthetic polypeptide"
QVQLQESGPGLVKPSETLSLTCTVSGVSLPDYGVSWIRQPPGKGLEWIGVIWGSETTYYNSSLKSRVTISKDNSKNQVSLKLSSVTAADTAVYYCAKHYYYGGSYAMDYWGQGTLVTVSSGGGGSGGGGSGGGGSGGGGSEIVMTQSPATLSLSPGERATLSCRASQDISKYLNWYQQKPGQAPRLLIYHTSRLHSGIPARFSGSGSGTDYTLTISSLQPEDFAVYFCQQGNTLPYTFGQGTKLEIK

SEQ ID NO: 93 - protein, 242 aa, Artificial Sequence
  source: /note="Description of Artificial Sequence: Synthetic polypeptide"
EIVMTQSPATLSLSPGERATLSCRASQDISKYLNWYQQKPGQAPRLLIYHTSRLHSGIPARFSGSGSGTDYTLTISSLQPEDFAVYFCQQGNTLPYTFGQGTKLEIKGGGGSGGGGSGGGGSQVQLQESGPGLVKPSETLSLTCTVSGVSLPDYGVSWIRQPPGKGLEWIGVIWGSETTYYNSSLKSRVTISKDNSKNQVSLKLSSVTAADTAVYYCAKHYYYGGSYAMDYWGQGTLVTVSS

SEQ ID NO: 94 - protein, 242 aa, Artificial Sequence
  source: /note="Description of Artificial Sequence: Synthetic polypeptide"
QVQLQESGPGLVKPSETLSLTCTVSGVSLPDYGVSWIRQPPGKGLEWIGVIWGSETTYYNSSLKSRVTISKDNSKNQVSLKLSSVTAADTAVYYCAKHYYYGGSYAMDYWGQGTLVTVSSGGGGSGGGGSGGGGSEIVMTQSPATLSLSPGERATLSCRASQDISKYLNWYQQKPGQAPRLLIYHTSRLHSGIPARFSGSGSGTDYTLTISSLQPEDFAVYFCQQGNTLPYTFGQGTKLEIK

SEQ ID NO: 95 - protein, 242 aa, Artificial Sequence
  source: /note="Description of Artificial Sequence: Synthetic polypeptide"
DIQMTQTTSSLSASLGDRVTISCRASQDISKYLNWYQQKPDGTVKLLIYHTSRLHSGVPSRFSGSGSGTDYSLTISNLEQEDIATYFCQQGNTLPYTFGGGTKLEITGGGGSGGGGSGGGGSEVKLQESGPGLVAPSQSLSVTCTVSGVSLPDYGVSWIRQPPRKGLEWLGVIWGSETTYYNSALKSRLTIIKDNSKSQVFLKMNSLQTDDTAIYYCAKHYYYGGSYAMDYWGQGTSVTVSS

SEQ ID NO: 96 - protein, 119 aa, Artificial Sequence
  source: /note="Description of Artificial Sequence: Synthetic polypeptide"
QVQLLESGAELVRPGSSVKISCKASGYAFSSYWMNWVKQRPGQGLEWIGQIYPGDGDTNYNGKFKGQATLTADKSSSTAYMQLSGLTSEDSAVYSCARKTISSVVDFYFDYWGQGTTVT

SEQ ID NO: 97 - protein, 111 aa, Artificial Sequence
  source: /note="Description of Artificial Sequence: Synthetic polypeptide"
ELVLTQSPKFMSTSVGDRVSVTCKASQNVGTNVAWYQQKPGQSPKPLIYSATYRNSGVPDRFTGSGSGTDFTLTITNVQSKDLADYFYFCQYNRYPYTSGGGTKLEIKRRS

SEQ ID NO: 98 - protein, 244 aa, Artificial Sequence
  source: /note="Description of Artificial Sequence: Synthetic polypeptide"
EVQLQQSGPELVKPGASMKISCKASGYSFTGYTMNWVKQSHGKNLEWIGLINPYNGGTIYNQKFKGKATLTVDKSSSTAYMELLSLTSEDSAVYYCARDYGFVLDYWGQGTTLTVSSGGGGSGGGGSGGGGSGGGGSQIVLTQSPSIMSVSPGEKVTITCSASSSVSYMHWFQQKPGTSPKLCIYSTSNLASGVPARFSGRGSGTSYSLTISRVAAEDAATYYCQQRSNYPPWTFGGGTKLEIK

SEQ ID NO: 99 - protein, 244 aa, Artificial Sequence
  source: /note="Description of Artificial Sequence: Synthetic polypeptide"
EVQLQQSGPELVKPGASMKISCKASGYSFTGYTMNWVKQSHGKNLEWIGLINPYNGGTIYNQKFKGKATLTVDKSSSTAYMELLSLTSEDSAVYYCARDYGFVLDYWGQGTTLTVSSGGGGSGGGGSGGGGSGGGGSQIVLTQSPAIMSASPGEKVTITCSASSSVSYLHWFQQKPGTSPKLWVYSTSNLPSGVPARFGGSGSGTSYSLTISRMEAEDAATYYCQQRSIYPPWTFGGGTKLEIK

SEQ ID NO: 100 - protein, 244 aa, Artificial Sequence
  source: /note="Description of Artificial Sequence: Synthetic polypeptide"
EVQLQQSGPELVKPGASMKISCKASGYSFTGYTMNWVKQSHGKNLEWIGLINPYNGGTIYNQKFKGKATLTVDKSSSTAYMELLSLTSEDSAVYYCARDYGFVLDYWGQGTTLTVSSGGGGSGGGGSGGGGSGGGGSQIVLTQSPSIMSVSPGEKVTITCSASSSVSYMHWFQQKPGTSPKLGIYSTSNLASGVPARFSGRGSGTSYSLTISRVAAEDAATYYCQQRSNYPPWTFGGGTKLEIK

SEQ ID NO: 101 - DNA, 521 bp, Artificial Sequence
  source: /note="Description of Artificial Sequence: Synthetic polynucleotide"
acccctctctccagccactaagccagttgctccctcggctgacggctgcacgcgaggcctccgaacgtcttacgccttgtggcgcgcccgtccttgtcccgggtgtgatggcggggtgtggggcggagggcgtggcggggaagggccggcgacgagagccgcgcgggacgactcgtcggcgataaccggtgtcgggtagcgccagccgcgcgacggtaacgagggaccgcgacaggcagacgctcccatgatcactctgcacgccgaaggcaaatagtgcaggccgtgcggcgcttggcgttccttggaagggctgaatccccgcctcgtccttcgcagcggccccccgggtgttcccatcgccgcttctaggcccactgcgacgcttgcctgcacttcttacacgctctgggtcccagccgcggcgacgcaaagggccttggtgcgggtctcgtcggcgcagggacgcgtttgggtcccgacggaaccttttccgcgttggggttggggcaccataagct

SEQ ID NO: 102 - DNA, 118 bp, Artificial Sequence
  source: /note="Description of Artificial Sequence: Synthetic polynucleotide"
acccctctctccagccactaagccagttgctccctcggctgacggctgcacgcgaggcctccgaacgtcttacgccttgtggcgcgcccgtccttgtcccgggtgtgatggcggggtg

SEQ ID NO: 103 - DNA, 221 bp, Artificial Sequence
  source: /note="Description of Artificial Sequence: Synthetic polynucleotide"
acccctctctccagccactaagccagttgctccctcggctgacggctgcacgcgaggcctccgaacgtcttacgccttgtggcgcgcccgtccttgtcccgggtgtgatggcggggtgtggggcggagggcgtggcggggaagggccggcgacgagagccgcgcgggacgactcgtcggcgataaccggtgtcgggtagcgccagccgcgcgacggtaacg

SEQ ID NO: 104 - DNA, 324 bp, Artificial Sequence
  source: /note="Description of Artificial Sequence: Synthetic polynucleotide"
acccctctctccagccactaagccagttgctccctcggctgacggctgcacgcgaggcctccgaacgtcttacgccttgtggcgcgcccgtccttgtcccgggtgtgatggcggggtgtggggcggagggcgtggcggggaagggccggcgacgagagccgcgcgggacgactcgtcggcgataaccggtgtcgggtagcgccagccgcgcgacggtaacgagggaccgcgacaggcagacgctcccatgatcactctgcacgccgaaggcaaatagtgcaggccgtgcggcgcttggcgttccttggaagggctgaatccccg

SEQ ID NO: 105 - DNA, 422 bp, Artificial Sequence
  source: /note="Description of Artificial Sequence: Synthetic polynucleotide"
acccctctctccagccactaagccagttgctccctcggctgacggctgcacgcgaggcctccgaacgtcttacgccttgtggcgcgcccgtccttgtcccgggtgtgatggcggggtgtggggcggagggcgtggcggggaagggccggcgacgagagccgcgcgggacgactcgtcggcgataaccggtgtcgggtagcgccagccgcgcgacggtaacgagggaccgcgacaggcagacgctcccatgatcactctgcacgccgaaggcaaatagtgcaggccgtgcggcgcttggcgttccttggaagggctgaatccccgcctcgtccttcgcagcggccccccgggtgttcccatcgccgcttctaggcccactgcgacgcttgcctgcacttcttacacgctctgggtcccagccg

SEQ ID NO: 106 - protein, 21 aa, Artificial Sequence
  source: /note="Description of Artificial Sequence: Synthetic peptide"
  VARIANT (1)..(3): /replace=" "
  misc_feature (1)..(21): /note="Variant residues given in the sequence have no preference with respect to those in the annotations for variant positions"
GSGEGRGSLLTCGDVEENPGP

SEQ ID NO: 107 - protein, 22 aa, Artificial Sequence
  source: /note="Description of Artificial Sequence: Synthetic peptide"
  VARIANT (1)..(3): /replace=" "
  misc_feature (1)..(22): /note="Variant residues given in the sequence have no preference with respect to those in the annotations for variant positions"
GSGATNFSLLKQAGDVEENPGP

SEQ ID NO: 108 - protein, 23 aa, Artificial Sequence
  source: /note="Description of Artificial Sequence: Synthetic peptide"
  VARIANT (1)..(3): /replace=" "
  misc_feature (1)..(23): /note="Variant residues given in the sequence have no preference with respect to those in the annotations for variant positions"
GSGQCTNYALLKLAGDVESNPGP

SEQ ID NO: 109 - protein, 25 aa, Artificial Sequence
  source: /note="Description of Artificial Sequence: Synthetic peptide"
  VARIANT (1)..(3): /replace=" "
  misc_feature (1)..(25): /note="Variant residues given in the sequence have no preference with respect to those in the annotations for variant positions"
GSGVKQTLNFDLLKLAGDVESNPGP

SEQ ID NO: 110 - protein, 1132 aa, Homo sapiens [sequence omitted]

SEQ ID NO: 111 - DNA, 4027 bp, Homo sapiens
caggcagcgtggtcctgctgcgcacgtgggaagccctggccccggccacccccgcgatgccgcgcgctccccgctgccgagccgtgcgctccctgctgcgcagccactaccgcgaggtgctgccgctggccacgttcgtgcggcgcctggggccccagggctggcggctggtgcagcgcggggacccggcggctttccgcgcgctggtggcccagtgcctggtgtgcgtgccctgggacgcacggccgccccccgccgccccctccttccgccaggtgtcctgcctgaaggagctggtggcccgagtgctgcagaggctgtgcgagcgcggcgcgaagaacgtgctggccttcggcttcgcgctgctggacggggcccgcgggggcccccccgaggccttcaccaccagcgtgcgcagctacctgcccaacacggtgaccgacgcactgcgggggagcggggcgtgggggctgctgttgcgccgcgtgggcgacgacgtgctggttcacctgctggcacgctgcgcgctctttgtgctggtggctcccagctgcgcctaccaggtgtgcgggccgccgctgtaccagctcggcgctgccactcaggcccggcccccgccacacgctagtggaccccgaaggcgtctgggatgcgaacgggcctggaaccatagcgtcagggaggccggggtccccctgggcctgccagccccgggtgcgaggaggcgcgggggcagtgccagccgaagtctgccgttgcccaagaggcccaggcgtggcgctgcccctgagccggagcggacgcccgttgggcaggggtcctgggcccacccgggcaggacgcgtggaccgagtgaccgtggtttctgtgtggtgtcacctgccagacccgccgaagaagccacctctttggagggtgcgctctctggcacgcgccactcccacccatccgtgggccgccagcaccacgcgggccccccatccacatcgcggccaccacgtccctgggacacgccttgtcccccggtgtacgccgagaccaagcacttcctctactcctcaggcgacaaggagcagctgcggccctccttcctactcagctctctgaggcccagcctgactggcgctcggaggctcgtggagaccatctttctgggttccaggccctggatgccagggactccccgcaggttgccccgcctgccccagcgctactggcaaatgcggcccctgtttctggagctgcttgggaaccacgcgcagtgcccctacggggtgctcctcaagacgcactgcccgctgcgagctgcggtcaccccagcagccggtgtctgtgcccgggagaagccccagggctctgtggcggcccccgaggaggaggacacagacccccgtcgcctggtgcagctgctccgccagcacagcagcccctggcaggtgtacggcttcgtgcgggcctgcctgcgccggctggtgcccccaggcctctggggctccaggcacaacgaacgccgcttcctcaggaacaccaagaagttcatctccctggggaagcatgccaagctctcgctgcaggagctgacgtggaagatgagcgtgcggggctgcgcttggctgcgcaggagcccaggggttggctgtgttccggccgcagagcaccgtctgcgtgaggagatcctggccaagttcctgcactggctgatgagtgtgtacgtcgtcgagctgctcaggtctttcttttatgtcacggagaccacgtttcaaaagaacaggctctttttctaccggaagagtgtctggagcaagttgcaaagcattggaatcagacagcacttgaagagggtgcagctgcgggagctgtcggaagcagaggtcaggcagcatcgggaagccaggcccgccctgctgacgtccagactccgcttcatccccaagcctgacgggctgcggccgattgtgaacatggactacgtcgtgggagccagaacgttccgcagagaaaagagggccgagcgtctcacctcgagggtgaaggcactgttcagcgtgctcaactacgagcgggcgcggcgccccggcctcctgggcgcctctgtgctgggcctggacgatatccacagggcctggcgcaccttcgtgctgcgtgtgcgggcccaggacccgccgcctgagctgtactttgtcaaggtggatgtgacgggcgcgtacgacaccatcccccaggacaggctcacggaggtcatcgccagcatcatcaaaccccagaacacgtactgcgtgcgtcggtatgccgtggtccagaaggccgcccatgggcacgtccgcaaggccttcaagagccacgtctctaccttgacagacctccagccgtacatgcgacagttcgtggctcacctgcaggagaccagcccgctgagggatgccgtcgtcatcgagcagagctcctccctgaatgaggccagcagtggcctcttcgacgtcttcctacgcttcatgtgccaccacgccgtgcgcatcaggggcaagtcctacgtccagtgccaggggatcccgcagggctccatcctctccacgctgctctgcagcctgtgctacggcgacatggagaacaagctgtttgcggggattcggcgggacgggctgctcctgcgtttggtggatgatttcttgttggtgacacctcacctcacccacgcgaaaaccttcctcaggaccctggtccgaggtgtccctgagtatggctgcgtggtgaacttgcggaagacagtggtgaacttccctgtagaagacgaggccctgggtggcacggcttttgttcagatgccggcccacggcctattcccctggtgcggcctgctgctggatacccggaccctggaggtgcagagcgactactccagctatgcccggacctccatcagagccagtctcaccttcaaccgcggcttcaaggctgggaggaacatgcgtcgcaaactctttggggtcttgcggctgaagtgtcacagcctgtttctggatttgcaggtgaacagcctccagacggtgtgcaccaacatctacaagatcctcctgctgcaggcgtacaggtttcacgcatgtgtgctgcagctcccatttcatcagcaagtttggaagaaccccacatttttcctgcgcgtcatctctgacacggcctccctctgctactccatcctgaaagccaagaacgcagggatgtcgctgggggccaagggcgccgccggccctctgccctccgaggccgtgcagtggctgtgccaccaagcattcctgctcaagctgactcgacaccgtgtcacctacgtgccactcctggggtcactcaggacagcccagacgcagctgagtcggaagctcccggggacgacgctgactgccctggaggccgcagccaacccggcactgccctcagacttcaagaccatcctggactgatggccacccgcccacagccaggccgagagcagacaccagcagccctgtcacgccgggctctacgtcccagggagggaggggcggcccacacccaggcccgcaccgctgggagtctgaggcctgagtgagtgtttggccgaggcctgcatgtccggctgaaggctgagtgtccggctgaggcctgagcgagtgtccagccaagggctgagtgtccagcacacctgccgtcttcacttccccacaggctggcgctcggctccaccccagggccagcttttcctcaccaggagcccggcttccactccccacataggaatagtccatccccagattcgccattgttcacccctcgccctgccctcctttgccttccacccccaccatccaggtggagaccctgagaaggaccctgggagctctgggaatttggagtgaccaaaggtgtgccctgtacacaggcgaggaccctgcacctggatgggggtccctgtgggtcaaattggggggaggtgctgtgggagtaaaatactgaatatatgagtttttcagttttgaaaaaaaaaaaaaaaaaa

SEQ ID NO: 112 - protein, 248 aa, Artificial Sequence
  source: /note="Description of Artificial Sequence: Synthetic polypeptide"
QVQLLESGAELVRPGSSVKISCKASGYAFSSYWMNWVKQRPGQGLEWIGQIYPGDGDTNYNGKFKGQATLTADKSSSTAYMQLSGLTSEDSAVYSCARKTISSVVDFYFDYWGQGTTVTGSTSGSGKPGSGEGSTKGELVLTQSPKFMSTSVGDRVSVTCKASQNVGTNVAWYQQKPGQSPKPLIYSATYRNSGVPDRFTGSGSGTDFTLTITNVQSKDLADYFYFCQYNRYPYTSGGGTKLEIKRRS

SEQ ID NO: 113 - protein, 10 aa, Artificial Sequence
  source: /note="Description of Artificial Sequence: Synthetic peptide"
GYTFTGYYMH

SEQ ID NO: 114 - protein, 10 aa, Artificial Sequence
  source: /note="Description of Artificial Sequence: Synthetic peptide"
GFTFSSYWMH

SEQ ID NO: 115 - protein, 10 aa, Artificial Sequence
  source: /note="Description of Artificial Sequence: Synthetic peptide"
GYTFTDYYMH

SEQ ID NO: 116 - protein, 10 aa, Artificial Sequence
  source: /note="Description of Artificial Sequence: Synthetic peptide"
GYTFTSYYMH

SEQ ID NO: 117 - protein, 10 aa, Artificial Sequence
  source: /note="Description of Artificial Sequence: Synthetic peptide"
GFTFSSYAMH

SEQ ID NO: 118 - protein, 10 aa, Artificial Sequence
  source: /note="Description of Artificial Sequence: Synthetic peptide"
GYPFTGYSLH

SEQ ID NO: 119 - protein, 10 aa, Artificial Sequence
  source: /note="Description of Artificial Sequence: Synthetic peptide"
GYTFTSYYMH

SEQ ID NO: 120 - protein, 10 aa, Artificial Sequence
  source: /note="Description of Artificial Sequence: Synthetic peptide"
GYTFTSYGIS

SEQ ID NO: 121 - protein, 10 aa, Artificial Sequence
  source: /note="Description of Artificial Sequence: Synthetic peptide"
GYTFTGYYMH

SEQ ID NO: 122 - protein, 10 aa, Artificial Sequence
  source: /note="Description of Artificial Sequence: Synthetic peptide"
GFIFSDYYMG

SEQ ID NO: 123 - protein, 10 aa, Artificial Sequence
  source: /note="Description of Artificial Sequence: Synthetic peptide"
GFTFRGYYIH

SEQ ID NO: 124 - protein, 10 aa, Artificial Sequence
  source: /note="Description of Artificial Sequence: Synthetic peptide"
GFTFDDYAMH

SEQ ID NO: 125 - protein, 10 aa, Artificial Sequence
  source: /note="Description of Artificial Sequence: Synthetic peptide"
GFTFSSYWMH

SEQ ID NO: 126 - protein, 10 aa, Artificial Sequence
  source: /note="Description of Artificial Sequence: Synthetic peptide"
GFTFSSYGMH

SEQ ID NO: 127 - protein, 10 aa, Artificial Sequence
  source: /note="Description of Artificial Sequence: Synthetic peptide"
GFTFSSYAMS

SEQ ID NO: 128 - protein, 10 aa, Artificial Sequence
  source: /note="Description of Artificial Sequence: Synthetic peptide"
GYTFTSYYMH

SEQ ID NO: 129 - protein, 10 aa, Artificial Sequence
  source: /note="Description of Artificial Sequence: Synthetic peptide"
GDTSTRHYIH

SEQ ID NO: 130 - protein, 10 aa, Artificial Sequence
  source: /note="Description of Artificial Sequence: Synthetic peptide"
GYTFTNYYMH

SEQ ID NO: 131 - protein, 12 aa, Artificial Sequence
  source: /note="Description of Artificial Sequence: Synthetic peptide"
GFSLSTAGVHVG

SEQ ID NO: 132 - protein, 10 aa, Artificial Sequence
  source: /note="Description of Artificial Sequence: Synthetic peptide"
GYSFTGYTMN

SEQ ID NO: 133 - protein, 17 aa, Artificial Sequence
  source: /note="Description of Artificial Sequence: Synthetic peptide"
RINPNSGGTNYAQKFQG

SEQ ID NO: 134 - protein, 17 aa, Artificial Sequence
  source: /note="Description of Artificial Sequence: Synthetic peptide"
WINPNSGGTNYAQKFQG

SEQ ID NO: 135 - protein, 17 aa, Artificial Sequence
  source: /note="Description of Artificial Sequence: Synthetic peptide"
RINTDGSTTTYADSVEG

SEQ ID NO: 136 - protein, 16 aa, Artificial Sequence
  source: /note="Description of Artificial Sequence: Synthetic peptide"
IINPSGGSTSYAQKFQ

SEQ ID NO: 137 - protein, 17 aa, Artificial Sequence
  source: /note="Description of Artificial Sequence: Synthetic peptide"
VISYDGSNKYYADSVKG

SEQ ID NO: 138 - protein, 17 aa, Artificial Sequence
  source: /note="Description of Artificial Sequence: Synthetic peptide"
WINPNSGGTNYAQKFQG

SEQ ID NO: 139 - protein, 17 aa, Artificial Sequence
  source: /note="Description of Artificial Sequence: Synthetic peptide"
IINPSGGSTGYAQKFQG

SEQ ID NO: 140 - protein, 16 aa, Artificial Sequence
  source: /note="Description of Artificial Sequence: Synthetic peptide"
WISAYNGNTNYAQKLQ

SEQ ID NO: 141 - protein, 17 aa, Artificial Sequence
  source: /note="Description of Artificial Sequence: Synthetic peptide"
WINPNSGGTNYAQNFQG

SEQ ID NO: 142 - protein, 17 aa, Artificial Sequence
  source: /note="Description of Artificial Sequence: Synthetic peptide"
RINPNSGGTNYAQKFQG

SEQ ID NO: 143 - protein, 17 aa, Artificial Sequence
  source: /note="Description of Artificial Sequence: Synthetic peptide"
YIGRSGSSMYYADSVKG

SEQ ID NO: 144 - protein, 17 aa, Artificial Sequence
  source: /note="Description of Artificial Sequence: Synthetic peptide"
IINPSGGSRAYAQKFQG

SEQ ID NO: 145 - protein, 16 aa, Artificial Sequence
  source: /note="Description of Artificial Sequence: Synthetic peptide"
GISWNSGSIGYADSVK

SEQ ID NO: 146 - protein, 17 aa, Artificial Sequence
  source: /note="Description of Artificial Sequence: Synthetic peptide"
GISWNSGSTGYADSVKG

SEQ ID NO: 147 - protein, 17 aa, Artificial Sequence
  source: /note="Description of Artificial Sequence: Synthetic peptide"
RINSDGSSTSYADSVKG

SEQ ID NO: 148 - protein, 17 aa, Artificial Sequence
  source: /note="Description of Artificial Sequence: Synthetic peptide"
VISYDGSNKYYADSVKG

SEQ ID NO: 149 - protein, 17 aa, Artificial Sequence
  source: /note="Description of Artificial Sequence: Synthetic peptide"
AISGSGGSTYYADSVKG

SEQ ID NO: 150 - protein, 17 aa, Artificial Sequence
  source: /note="Description of Artificial Sequence: Synthetic peptide"
IINPSGGSTSYAQKFQG

SEQ ID NO: 151 - protein, 21 aa, Artificial Sequence
  source: /note="Description of Artificial Sequence: Synthetic peptide"
VINPTTGPATGSPAYAQMLQG

SEQ ID NO: 152 - protein, 17 aa, Artificial Sequence
  source: /note="Description of Artificial Sequence: Synthetic peptide"
IINPSGGYTTYAQKFQG

SEQ ID NO: 153 - protein, 16 aa, Artificial Sequence
  source: /note="Description of Artificial Sequence: Synthetic peptide"
LISWADDKRYRPSLRS

SEQ ID NO: 154 - protein, 17 aa, Artificial Sequence
  source: /note="Description of Artificial Sequence: Synthetic peptide"
LITPYNGASSYNQKFRG

SEQ ID NO: 155 - protein, 8 aa, Artificial Sequence
  source: /note="Description of Artificial Sequence: Synthetic peptide"
GRYYGMDV

SEQ ID NO: 156 - protein, 17 aa, Artificial Sequence
  source: /note="Description of Artificial Sequence: Synthetic peptide"
DLRRTVVTPRAYYGMDV

SEQ ID NO: 157 - protein, 11 aa, Artificial Sequence
  source: /note="Description of Artificial Sequence: Synthetic peptide"
GEWDGSYYYDY

SEQ ID NO: 158 - protein, 5 aa, Artificial Sequence
  source: /note="Description of Artificial Sequence: Synthetic peptide"
GHWAV

SEQ ID NO: 159 - protein, 6 aa, Artificial Sequence
  source: /note="Description of Artificial Sequence: Synthetic peptide"
GWDFDY

SEQ ID NO: 160 - protein, 17 aa, Artificial Sequence
  source: /note="Description of Artificial Sequence: Synthetic peptide"
YRLIAVAGDYYYYGMDV

SEQ ID NO: 161 - protein, 12 aa, Artificial Sequence
  source: /note="Description of Artificial Sequence: Synthetic peptide"
WKVSSSSPAFDY

SEQ ID NO: 162 - protein, 10 aa, Artificial Sequence
  source: /note="Description of Artificial Sequence: Synthetic peptide"
DHYGGNSLFY

SEQ ID NO: 163 - protein, 12 aa, Artificial Sequence
  source: /note="Description of Artificial Sequence: Synthetic peptide"
GGYSSSSDAFDI

SEQ ID NO: 164 - protein, 13 aa, Artificial Sequence
  source: /note="Description of Artificial Sequence: Synthetic peptide"
VAGGIYYYYGMDV

SEQ ID NO: 165 - protein, 6 aa, Artificial Sequence
  source: /note="Description of Artificial Sequence: Synthetic peptide"
GWDFDY

SEQ ID NO: 166 - protein, 9 aa, Artificial Sequence
  source: /note="Description of Artificial Sequence: Synthetic peptide"
TTTSYAFDI

SEQ ID NO: 167 - protein, 12 aa, Artificial Sequence
  source: /note="Description of Artificial Sequence: Synthetic peptide"
SPVVAATEDFQH

SEQ ID NO: 168 - protein, 13 aa, Artificial Sequence
  source: /note="Description of Artificial Sequence: Synthetic peptide"
TASCGGDCYYLDY

SEQ ID NO: 169 - protein, 13 aa, Artificial Sequence
  source: /note="Description of Artificial Sequence: Synthetic peptide"
DGSSSWSWGYFDY

SEQ ID NO: 170 - protein, 14 aa, Artificial Sequence
  source: /note="Description of Artificial Sequence: Synthetic peptide"
DSSSWYGGGSAFDI

SEQ ID NO: 171 - protein, 14 aa, Artificial Sequence
  source: /note="Description of Artificial Sequence: Synthetic peptide"
DSSSWYGGGSAFDI

SEQ ID NO: 172 - protein, 13 aa, Artificial Sequence
  source: /note="Description of Artificial Sequence: Synthetic peptide"
TGWVGSYYYYMDV

SEQ ID NO: 173 - protein, 12 aa, Artificial Sequence
  source: /note="Description of Artificial Sequence: Synthetic peptide"
GYSRYYYYGMDV

SEQ ID NO: 174 - protein, 13 aa, Artificial Sequence
  source: /note="Description of Artificial Sequence: Synthetic peptide"
REAAAGHDWYFDL

SEQ ID NO: 175 - protein, 11 aa, Artificial Sequence
  source: /note="Description of Artificial Sequence: Synthetic peptide"
SPRVTTGYFDY

SEQ ID NO: 176 - protein, 13 aa, Artificial Sequence
  source: /note="Description of Artificial Sequence: Synthetic peptide"
SVVGRSAPYYFDY

SEQ ID NO: 177 - protein, 13 aa, Artificial Sequence
  source: /note="Description of Artificial Sequence: Synthetic peptide"
IRSCGGDCYYFDN

SEQ ID NO: 178 - protein, 9 aa, Artificial Sequence
  source: /note="Description of Artificial Sequence: Synthetic peptide"
QGFDGYEAN

SEQ ID NO: 179 - protein, 10 aa, Artificial Sequence
  source: /note="Description of Artificial Sequence: Synthetic peptide"
GGYDGRGFDY

SEQ ID NO: 180 - protein, 11 aa, Artificial Sequence
  source: /note="Description of Artificial Sequence: Synthetic peptide"
RASQSVSSNFA

SEQ ID NO: 181 - protein, 11 aa, Artificial Sequence
  source: /note="Description of Artificial Sequence: Synthetic peptide"
QASQDISNSLN

SEQ ID NO: 182 - protein, 11 aa, Artificial Sequence
  source: /note="Description of Artificial Sequence: Synthetic peptide"
RASQSINTYLN

SEQ ID NO: 183 - protein, 11 aa, Artificial Sequence
  source: /note="Description of Artificial Sequence: Synthetic peptide"
RASQSISDRLA

SEQ ID NO: 184 - protein, 11 aa, Artificial Sequence
  source: /note="Description of Artificial Sequence: Synthetic peptide"
RASQSIRYYLS

SEQ ID NO: 185 - protein, 11 aa, Artificial Sequence
  source: /note="Description of Artificial Sequence: Synthetic peptide"
RASQGVGRWLA

SEQ ID NO: 186 - protein, 12 aa, Artificial Sequence
  source: /note="Description of Artificial Sequence: Synthetic peptide"
RASQSVYTKYLG

SEQ ID NO: 187 - protein, 11 aa, Artificial Sequence
  source: /note="Description of Artificial Sequence: Synthetic peptide"
RASQDSGTWLA

SEQ ID NO: 188 - protein, 11 aa, Artificial Sequence
  source: /note="Description of Artificial Sequence: Synthetic peptide"
RASQDISSALA

SEQ ID NO: 189 - protein, 17 aa, Artificial Sequence
  source: /note="Description of Artificial Sequence: Synthetic peptide"
KSSHSVLYNRNNKNYLA

SEQ ID NO: 190 - protein, 11 aa, Artificial Sequence
  source: /note="Description of Artificial Sequence: Synthetic peptide"
RASQSIRYYLS

SEQ ID NO: 191 - protein, 11 aa, Artificial Sequence
  source: /note="Description of Artificial Sequence: Synthetic peptide"
RASQSISTWLA

SEQ ID NO: 192 - protein, 12 aa, Artificial Sequence
  source: /note="Description of Artificial Sequence: Synthetic peptide"
RASQSVTSNYLA

SEQ ID NO: 193 - protein, 11 aa, Artificial Sequence
  source: /note="Description of Artificial Sequence: Synthetic peptide"
RASENVNIWLA

SEQ ID NO: 194 - protein, 11 aa, Artificial Sequence
  source: /note="Description of Artificial Sequence: Synthetic peptide"
QGDALRSYYAS

SEQ ID NO: 195 - protein, 11 aa, Artificial Sequence
  source: /note="Description of Artificial Sequence: Synthetic peptide"
QGDSLRSYYAS

SEQ ID NO: 196 - protein, 11 aa, Artificial Sequence
  source: /note="Description of Artificial Sequence: Synthetic peptide"
QGDSLRSYYAS

SEQ ID NO: 197 - protein, 12 aa, Artificial Sequence
  source: /note="Description of Artificial Sequence: Synthetic peptide"
RASQSVSSNYLA

SEQ ID NO: 198 - protein, 12 aa, Artificial Sequence
  source: /note="Description of Artificial Sequence: Synthetic peptide"
RASQSVYTKYLG

SEQ ID NO: 199 - protein, 11 aa, Artificial Sequence
  source: /note="Description of Artificial Sequence: Synthetic peptide"
RASQSISSYLN

SEQ ID NO: 200 - protein, 11 aa, Artificial Sequence
  source: /note="Description of Artificial Sequence: Synthetic peptide"
RASQSISSWLA

SEQ ID NO: 201 - protein, 10 aa, Artificial Sequence
  source: /note="Description of Artificial Sequence: Synthetic peptide"
RASQGISDYS

SEQ ID NO: 202 - protein, 11 aa, Artificial Sequence
  source: /note="Description of Artificial Sequence: Synthetic peptide"
RASENVNIWLA

SEQ ID NO: 203 - protein, 11 aa, Artificial Sequence
  source: /note="Description of Artificial Sequence: Synthetic peptide"
RASRGISSALA

SEQ ID NO: 204 - protein, 10 aa, Artificial Sequence
  source: /note="Description of Artificial Sequence: Synthetic peptide"
SASSSVSYMH

SEQ ID NO: 205 - protein, 7 aa, Artificial Sequence
  source: /note="Description of Artificial Sequence: Synthetic peptide"
DASNRAT

SEQ ID NO: 206 - protein, 7 aa, Artificial Sequence
  source: /note="Description of Artificial Sequence: Synthetic peptide"
DASTLET

SEQ ID NO: 207 - protein, 7 aa, Artificial Sequence
  source: /note="Description of Artificial Sequence: Synthetic peptide"
AASSLQS

SEQ ID NO: 208 - protein, 7 aa, Artificial Sequence
  source: /note="Description of Artificial Sequence: Synthetic peptide"
KASSLES

SEQ ID NO: 209 - protein, 7 aa, Artificial Sequence
  source: /note="Description of Artificial Sequence: Synthetic peptide"
TASILQN

SEQ ID NO: 210 - protein, 7 aa, Artificial Sequence
  source: /note="Description of Artificial Sequence: Synthetic peptide"
AASTLQS

SEQ ID NO: 211 - protein, 7 aa, Artificial Sequence
  source: /note="Description of Artificial Sequence: Synthetic peptide"
DASTRAT

SEQ ID NO: 212 - protein, 7 aa, Artificial Sequence
  source: /note="Description of Artificial Sequence: Synthetic peptide"
DASTLED

SEQ ID NO: 213 - protein, 7 aa, Artificial Sequence
  source: /note="Description of Artificial Sequence: Synthetic peptide"
DASSLES

SEQ ID NO: 214 - protein, 7 aa, Artificial Sequence
  source: /note="Description of Artificial Sequence: Synthetic peptide"
WASTRKS

SEQ ID NO: 215 - protein, 7 aa, Artificial Sequence
  source: /note="Description of Artificial Sequence: Synthetic peptide"
TASILQN

SEQ ID NO: 216 - protein, 7 aa, Artificial Sequence
  source: /note="Description of Artificial Sequence: Synthetic peptide"
KASTLES

SEQ ID NO: 217 - protein, 7 aa, Artificial Sequence
  source: /note="Description of Artificial Sequence: Synthetic peptide"
GASTRAT

SEQ ID NO: 218 - protein, 7 aa, Artificial Sequence
  source: /note="Description of Artificial Sequence: Synthetic peptide"
KSSSLAS

SEQ ID NO: 219 - protein, 7 aa, Artificial Sequence
  source: /note="Description of Artificial Sequence: Synthetic peptide"
GKNNRPS

SEQ ID NO: 220 - protein, 7 aa, Artificial Sequence
  source: /note="Description of Artificial Sequence: Synthetic peptide"
GRSRRPS

SEQ ID NO: 221 - protein, 7 aa, Artificial Sequence
  source: /note="Description of Artificial Sequence: Synthetic peptide"
GKNNRPS

SEQ ID NO: 222 - protein, 7 aa, Artificial Sequence
  source: /note="Description of Artificial Sequence: Synthetic peptide"
DVSTRAT

SEQ ID NO: 223 - protein, 7 aa, Artificial Sequence
  source: /note="Description of Artificial Sequence: Synthetic peptide"
DASTRAT

SEQ ID NO: 224 - protein, 7 aa, Artificial Sequence
  source: /note="Description of Artificial Sequence: Synthetic peptide"
AASSLQS

SEQ ID NO: 225 - protein, 7 aa, Artificial Sequence
  source: /note="Description of Artificial Sequence: Synthetic peptide"
KASSLES

SEQ ID NO: 226 - protein, 7 aa, Artificial Sequence
  source: /note="Description of Artificial Sequence: Synthetic peptide"
AASTLQS

SEQ ID NO: 227 - protein, 7 aa, Artificial Sequence
  source: /note="Description of Artificial Sequence: Synthetic peptide"
KSSSLAS

SEQ ID NO: 228 - protein, 7 aa, Artificial Sequence
  source: /note="Description of Artificial Sequence: Synthetic peptide"
DASSLES

SEQ ID NO: 229 - protein, 7 aa, Artificial Sequence
  source: /note="Description of Artificial Sequence: Synthetic peptide"
DTSKLAS

SEQ ID NO: 230 - protein, 9 aa, Artificial Sequence
  source: /note="Description of Artificial Sequence: Synthetic peptide"
HQRSNWLYT

SEQ ID NO: 231 - protein, 9 aa, Artificial Sequence
  source: /note="Description of Artificial Sequence: Synthetic peptide"
QQHDNLPLT

SEQ ID NO: 232 - protein, 8 aa, Artificial Sequence
  source: /note="Description of Artificial Sequence: Synthetic peptide"
QQSFSPLT

SEQ ID NO: 233 - protein, 10 aa, Artificial Sequence
  source: /note="Description of Artificial Sequence: Synthetic peptide"
QQYGHLPMYT

SEQ ID NO: 234 - protein, 8 aa, Artificial Sequence
  source: /note="Description of Artificial Sequence: Synthetic peptide"
LQTYTTPD

SEQ ID NO: 235 - protein, 9 aa, Artificial Sequence
  source: /note="Description of Artificial Sequence: Synthetic peptide"
QQANSFPLT

SEQ ID NO: 236 - protein, 10 aa, Artificial Sequence
  source: /note="Description of Artificial Sequence: Synthetic peptide"
QHYGGSPLIT

SEQ ID NO: 237 - protein, 9 aa, Artificial Sequence
  source: /note="Description of Artificial Sequence: Synthetic peptide"
QQYNSYPLT

SEQ ID NO: 238 - protein, 9 aa, Artificial Sequence
  source: /note="Description of Artificial Sequence: Synthetic peptide"
QQFSSYPLT

SEQ ID NO: 239 - protein, 9 aa, Artificial Sequence
  source: /note="Description of Artificial Sequence: Synthetic peptide"
QQTQTFPLT

SEQ ID NO: 240 - protein, 8 aa, Artificial Sequence
  source: /note="Description of Artificial Sequence: Synthetic peptide"
LQTYTTPD

SEQ ID NO: 241 - protein, 10 aa, Artificial Sequence
  source: /note="Description of Artificial Sequence: Synthetic peptide"
QQYNTYSPYT

SEQ ID NO: 242 - protein, 9 aa, Artificial Sequence
  source: /note="Description of Artificial Sequence: Synthetic peptide"
QQYGSAPVT

SEQ ID NO: 243 - protein, 9 aa, Artificial Sequence
  source: /note="Description of Artificial Sequence: Synthetic peptide"
QQYQSYPLT

SEQ ID NO: 244 - protein, 10 aa, Artificial Sequence
  source: /note="Description of Artificial Sequence: Synthetic peptide"
NSRDSSGYPV

SEQ ID NO: 245 - protein, 11 aa, Artificial Sequence
  source: /note="Description of Artificial Sequence: Synthetic peptide"
NSRDNTANHYV

SEQ ID NO: 246 - protein, 11 aa, Artificial Sequence
  source: /note="Description of Artificial Sequence: Synthetic peptide"
NSRGSSGNHYV

SEQ ID NO: 247 - protein, 10 aa, Artificial Sequence
  source: /note="Description of Artificial Sequence: Synthetic peptide"
QQRSNWPPWT

SEQ ID NO: 248 - protein, 10 aa, Artificial Sequence
  source: /note="Description of Artificial Sequence: Synthetic peptide"
QHYGGSPLIT

SEQ ID NO: 249 - protein, 9 aa, Artificial Sequence
  source: /note="Description of Artificial Sequence: Synthetic peptide"
QQSYSIPLT

SEQ ID NO: 250 - protein, 9 aa, Artificial Sequence
  source: /note="Description of Artificial Sequence: Synthetic peptide"
QQYSSYPLT

SEQ ID NO: 251 - protein, 9 aa, Artificial Sequence
  source: /note="Description of Artificial Sequence: Synthetic peptide"
QQYYSYPLT

SEQ ID NO: 252 - protein, 9 aa, Artificial Sequence
  source: /note="Description of Artificial Sequence: Synthetic peptide"
QQYQSYPLT

SEQ ID NO: 253 - protein, 9 aa, Artificial Sequence
  source: /note="Description of Artificial Sequence: Synthetic peptide"
QQSYSTPWT

SEQ ID NO: 254 - protein, 9 aa, Artificial Sequence
  source: /note="Description of Artificial Sequence: Synthetic peptide"
QQWSGYPLT

SEQ ID NO: 255 - protein, 10 aa, Artificial Sequence
  source: /note="Description of Artificial Sequence: Synthetic peptide"
GVSLPDYGVS

SEQ ID NO: 256 - protein, 16 aa, Artificial Sequence
  source: /note="Description of Artificial Sequence: Synthetic peptide"
VIWGSETTYYNSALKS

SEQ ID NO: 257 - protein, 16 aa, Artificial Sequence
  source: /note="Description of Artificial Sequence: Synthetic peptide"
VIWGSETTYYSSSLKS

SEQ ID NO: 258 - protein, 16 aa, Artificial Sequence
  source: /note="Description of Artificial Sequence: Synthetic peptide"
VIWGSETTYYQSSLKS

SEQ ID NO: 259 - protein, 16 aa, Artificial Sequence
  source: /note="Description of Artificial Sequence: Synthetic peptide"
VIWGSETTYYNSSLKS

SEQ ID NO: 260 - protein, 12 aa, Artificial Sequence
  source: /note="Description of Artificial Sequence: Synthetic peptide"
HYYYGGSYAMDY

SEQ ID NO: 261 - protein, 11 aa, Artificial Sequence
  source: /note="Description of Artificial Sequence: Synthetic peptide"
RASQDISKYLN

SEQ ID NO: 262 - protein, 7 aa, Artificial Sequence
  source: /note="Description of Artificial Sequence: Synthetic peptide"
HTSRLHS

SEQ ID NO: 263 - protein, 9 aa, Artificial Sequence
  source: /note="Description of Artificial Sequence: Synthetic peptide"
QQGNTLPYT

SEQ ID NO: 264-268 - skipped (5 entries)

SEQ ID NO: 269 - protein, 486 aa, Artificial Sequence
  source: /note="Description of Artificial Sequence: Synthetic polypeptide"
MALPVTALLLPLALLLHAARPEIVMTQSPATLSLSPGERATLSCRASQDISKYLNWYQQKPGQAPRLLIYHTSRLHSGIPARFSGSGSGTDYTLTISSLQPEDFAVYFCQQGNTLPYTFGQGTKLEIKGGGGSGGGGSGGGGSQVQLQESGPGLVKPSETLSLTCTVSGVSLPDYGVSWIRQPPGKGLEWIGVIWGSETTYYSSSLKSRVTISKDNSKNQVSLKLSSVTAADTAVYYCAKHYYYGGSYAMDYWGQGTLVTVSSTTTPAPRPPTPAPTIASQPLSLRPEACRPAAGGAVHTRGLDFACDIYIWAPLAGTCGVLLLSLVITLYCKRGRKKLLYIFKQPFMRPVQTTQEEDGCSCRFPEEEEGGCELRVKFSRSADAPAYKQGQNQLYNELNLGRREEYDVLDKRRGRDPEMGGKPRRKNPQEGLYNELQKDKMAEAYSEIGMKGERRRGKGHDGLYQGLSTATKDTYDALHMQALPPR

SEQ ID NO: 270 - protein, 486 aa, Artificial Sequence
  source: /note="Description of Artificial Sequence: Synthetic polypeptide"
MALPVTALLLPLALLLHAARPEIVMTQSPATLSLSPGERATLSCRASQDISKYLNWYQQKPGQAPRLLIYHTSRLHSGIPARFSGSGSGTDYTLTISSLQPEDFAVYFCQQGNTLPYTFGQGTKLEIKGGGGSGGGGSGGGGSQVQLQESGPGLVKPSETLSLTCTVSGVSLPDYGVSWIRQPPGKGLEWIGVIWGSETTYYQSSLKSRVTISKDNSKNQVSLKLSSVTAADTAVYYCAKHYYYGGSYAMDYWGQGTLVTVSSTTTPAPRPPTPAPTIASQPLSLRPEACRPAAGGAVHTRGLDFACDIYIWAPLAGTCGVLLLSLVITLYCKRGRKKLLYIFKQPFMRPVQTTQEEDGCSCRFPEEEEGGCELRVKFSRSADAPAYKQGQNQLYNELNLGRREEYDVLDKRRGRDPEMGGKPRRKNPQEGLYNELQKDKMAEAYSEIGMKGERRRGKGHDGLYQGLSTATKDTYDALHMQALPPR

SEQ ID NO: 271 - protein, 486 aa, Artificial Sequence
  source: /note="Description of Artificial Sequence: Synthetic polypeptide"
MALPVTALLLPLALLLHAARPQVQLQESGPGLVKPSETLSLTCTVSGVSLPDYGVSWIRQPPGKGLEWIGVIWGSETTYYSSSLKSRVTISKDNSKNQVSLKLSSVTAADTAVYYCAKHYYYGGSYAMDYWGQGTLVTVSSGGGGSGGGGSGGGGSEIVMTQSPATLSLSPGERATLSCRASQDISKYLNWYQQKPGQAPRLLIYHTSRLHSGIPARFSGSGSGTDYTLTISSLQPEDFAVYFCQQGNTLPYTFGQGTKLEIKTTTPAPRPPTPAPTIASQPLSLRPEACRPAAGGAVHTRGLDFACDIYIWAPLAGTCGVLLLSLVITLYCKRGRKKLLYIFKQPFMRPVQTTQEEDGCSCRFPEEEEGGCELRVKFSRSADAPAYKQGQNQLYNELNLGRREEYDVLDKRRGRDPEMGGKPRRKNPQEGLYNELQKDKMAEAYSEIGMKGERRRGKGHDGLYQGLSTATKDTYDALHMQALPPR

SEQ ID NO: 272 - protein, 486 aa, Artificial Sequence
  source: /note="Description of Artificial Sequence: Synthetic polypeptide"
MALPVTALLLPLALLLHAARPQVQLQESGPGLVKPSETLSLTCTVSGVSLPDYGVSWIRQPPGKGLEWIGVIWGSETTYYQSSLKSRVTISKDNSKNQVSLKLSSVTAADTAVYYCAKHYYYGGSYAMDYWGQGTLVTVSSGGGGSGGGGSGGGGSEIVMTQSPATLSLSPGERATLSCRASQDISKYLNWYQQKPGQAPRLLIYHTSRLHSGIPARFSGSGSGTDYTLTISSLQPEDFAVYFCQQGNTLPYTFGQGTKLEIKTTTPAPRPPTPAPTIASQPLSLRPEACRPAAGGAVHTRGLDFACDIYIWAPLAGTCGVLLLSLVITLYCKRGRKKLLYIFKQPFMRPVQTTQEEDGCSCRFPEEEEGGCELRVKFSRSADAPAYKQGQNQLYNELNLGRREEYDVLDKRRGRDPEMGGKPRRKNPQEGLYNELQKDKMAEAYSEIGMKGERRRGKGHDGLYQGLSTATKDTYDALHMQALPPR

SEQ ID NO: 273 - protein, 491 aa, Artificial Sequence
  source: /note="Description of Artificial Sequence: Synthetic polypeptide"
MALPVTALLLPLALLLHAARPEIVMTQSPATLSLSPGERATLSCRASQDISKYLNWYQQKPGQAPRLLIYHTSRLHSGIPARFSGSGSGTDYTLTISSLQPEDFAVYFCQQGNTLPYTFGQGTKLEIKGGGGSGGGGSGGGGSGGGGSQVQLQESGPGLVKPSETLSLTCTVSGVSLPDYGVSWIRQPPGKGLEWIGVIWGSETTYYSSSLKSRVTISKDNSKNQVSLKLSSVTAADTAVYYCAKHYYYGGSYAMDYWGQGTLVTVSSTTTPAPRPPTPAPTIASQPLSLRPEACRPAAGGAVHTRGLDFACDIYIWAPLAGTCGVLLLSLVITLYCKRGRKKLLYIFKQPFMRPVQTTQEEDGCSCRFPEEEEGGCELRVKFSRSADAPAYKQGQNQLYNELNLGRREEYDVLDKRRGRDPEMGGKPRRKNPQEGLYNELQKDKMAEAYSEIGMKGERRRGKGHDGLYQGLSTATKDTYDALHMQALPPR

SEQ ID NO: 274 - protein, 491 aa, Artificial Sequence
  source: /note="Description of Artificial Sequence: Synthetic polypeptide"
MALPVTALLLPLALLLHAARPEIVMTQSPATLSLSPGERATLSCRASQDISKYLNWYQQKPGQAPRLLIYHTSRLHSGIPARFSGSGSGTDYTLTISSLQPEDFAVYFCQQGNTLPYTFGQGTKLEIKGGGGSGGGGSGGGGSGGGGSQVQLQESGPGLVKPSETLSLTCTVSGVSLPDYGVSWIRQPPGKGLEWIGVIWGSETTYYQSSLKSRVTISKDNSKNQVSLKLSSVTAADTAVYYCAKHYYYGGSYAMDYWGQGTLVTVSSTTTPAPRPPTPAPTIASQPLSLRPEACRPAAGGAVHTRGLDFACDIYIWAPLAGTCGVLLLSLVITLYCKRGRKKLLYIFKQPFMRPVQTTQEEDGCSCRFPEEEEGGCELRVKFSRSADAPAYKQGQNQLYNELNLGRREEYDVLDKRRGRDPEMGGKPRRKNPQEGLYNELQKDKMAEAYSEIGMKGERRRGKGHDGLYQGLSTATKDTYDALHMQALPPR

SEQ ID NO: 275 - protein, 491 aa, Artificial Sequence
  source: /note="Description of Artificial Sequence: Synthetic polypeptide"
MALPVTALLLPLALLLHAARPQVQLQESGPGLVKPSETLSLTCTVSGVSLPDYGVSWIRQPPGKGLEWIGVIWGSETTYYSSSLKSRVTISKDNSKNQVSLKLSSVTAADTAVYYCAKHYYYGGSYAMDYWGQGTLVTVSSGGGGSGGGGSGGGGSGGGGSEIVMTQSPATLSLSPGERATLSCRASQDISKYLNWYQQKPGQAPRLLIYHTSRLHSGIPARFSGSGSGTDYTLTISSLQPEDFAVYFCQQGNTLPYTFGQGTKLEIKTTTPAPRPPTPAPTIASQPLSLRPEACRPAAGGAVHTRGLDFACDIYIWAPLAGTCGVLLLSLVITLYCKRGRKKLLYIFKQPFMRPVQTTQEEDGCSCRFPEEEEGGCELRVKFSRSADAPAYKQGQNQLYNELNLGRREEYDVLDKRRGRDPEMGGKPRRKNPQEGLYNELQKDKMAEAYSEIGMKGERRRGKGHDGLYQGLSTATKDTYDALHMQALPPR

SEQ ID NO: 276 - protein, 491 aa, Artificial Sequence
  source: /note="Description of Artificial Sequence: Synthetic polypeptide"
MALPVTALLLPLALLLHAARPQVQLQESGPGLVKPSETLSLTCTVSGVSLPDYGVSWIRQPPGKGLEWIGVIWGSETTYYQSSLKSRVTISKDNSKNQVSLKLSSVTAADTAVYYCAKHYYYGGSYAMDYWGQGTLVTVSSGGGGSGGGGSGGGGSGGGGSEIVMTQSPATLSLSPGERATLSCRASQDISKYLNWYQQKPGQAPRLLIYHTSRLHSGIPARFSGSGSGTDYTLTISSLQPEDFAVYFCQQGNTLPYTFGQGTKLEIKTTTPAPRPPTPAPTIASQPLSLRPEACRPAAGGAVHTRGLDFACDIYIWAPLAGTCGVLLLSLVITLYCKRGRKKLLYIFKQPFMRPVQTTQEEDGCSCRFPEEEEGGCELRVKFSRSADAPAYKQGQNQLYNELNLGRREEYDVLDKRRGRDPEMGGKPRRKNPQEGLYNELQKDKMAEAYSEIGMKGERRRGKGHDGLYQGLSTATKDTYDALHMQALPPR

SEQ ID NO: 277 - protein, 491 aa, Artificial Sequence
  source: /note="Description of Artificial Sequence: Synthetic polypeptide"
MALPVTALLLPLALLLHAARPEIVMTQSPATLSLSPGERATLSCRASQDISKYLNWYQQKPGQAPRLLIYHTSRLHSGIPARFSGSGSGTDYTLTISSLQPEDFAVYFCQQGNTLPYTFGQGTKLEIKGGGGSGGGGSGGGGSGGGGSQVQLQESGPGLVKPSETLSLTCTVSGVSLPDYGVSWIRQPPGKGLEWIGVIWGSETTYYNSSLKSRVTISKDNSKNQVSLKLSSVTAADTAVYYCAKHYYYGGSYAMDYWGQGTLVTVSSTTTPAPRPPTPAPTIASQPLSLRPEACRPAAGGAVHTRGLDFACDIYIWAPLAGTCGVLLLSLVITLYCKRGRKKLLYIFKQPFMRPVQTTQEEDGCSCRFPEEEEGGCELRVKFSRSADAPAYKQGQNQLYNELNLGRREEYDVLDKRRGRDPEMGGKPRRKNPQEGLYNELQKDKMAEAYSEIGMKGERRRGKGHDGLYQGLSTATKDTYDALHMQALPPR

SEQ ID NO: 278 - protein, 491 aa, Artificial Sequence; identical to SEQ ID NO: 277
  source: /note="Description of Artificial Sequence: Synthetic polypeptide"

SEQ ID NO: 279 - protein, 491 aa, Artificial Sequence
  source: /note="Description of Artificial Sequence: Synthetic polypeptide"
MALPVTALLLPLALLLHAARPQVQLQESGPGLVKPSETLSLTCTVSGVSLPDYGVSWIRQPPGKGLEWIGVIWGSETTYYNSSLKSRVTISKDNSKNQVSLKLSSVTAADTAVYYCAKHYYYGGSYAMDYWGQGTLVTVSSGGGGSGGGGSGGGGSGGGGSEIVMTQSPATLSLSPGERATLSCRASQDISKYLNWYQQKPGQAPRLLIYHTSRLHSGIPARFSGSGSGTDYTLTISSLQPEDFAVYFCQQGNTLPYTFGQGTKLEIKTTTPAPRPPTPAPTIASQPLSLRPEACRPAAGGAVHTRGLDFACDIYIWAPLAGTCGVLLLSLVITLYCKRGRKKLLYIFKQPFMRPVQTTQEEDGCSCRFPEEEEGGCELRVKFSRSADAPAYKQGQNQLYNELNLGRREEYDVLDKRRGRDPEMGGKPRRKNPQEGLYNELQKDKMAEAYSEIGMKGERRRGKGHDGLYQGLSTATKDTYDALHMQALPPR

SEQ ID NO: 280 - protein, 486 aa, Artificial Sequence
  source: /note="Description of Artificial Sequence: Synthetic polypeptide"
MALPVTALLLPLALLLHAARPEIVMTQSPATLSLSPGERATLSCRASQDISKYLNWYQQKPGQAPRLLIYHTSRLHSGIPARFSGSGSGTDYTLTISSLQPEDFAVYFCQQGNTLPYTFGQGTKLEIKGGGGSGGGGSGGGGSQVQLQESGPGLVKPSETLSLTCTVSGVSLPDYGVSWIRQPPGKGLEWIGVIWGSETTYYNSSLKSRVTISKDNSKNQVSLKLSSVTAADTAVYYCAKHYYYGGSYAMDYWGQGTLVTVSSTTTPAPRPPTPAPTIASQPLSLRPEACRPAAGGAVHTRGLDFACDIYIWAPLAGTCGVLLLSLVITLYCKRGRKKLLYIFKQPFMRPVQTTQEEDGCSCRFPEEEEGGCELRVKFSRSADAPAYKQGQNQLYNELNLGRREEYDVLDKRRGRDPEMGGKPRRKNPQEGLYNELQKDKMAEAYSEIGMKGERRRGKGHDGLYQGLSTATKDTYDALHMQALPPR

SEQ ID NO: 281 - protein, 486 aa, Artificial Sequence
  source: /note="Description of Artificial Sequence: Synthetic polypeptide"
MALPVTALLLPLALLLHAARPDIQMTQTTSSLSASLGDRVTISCRASQDISKYLNWYQQKPDGTVKLLIYHTSRLHSGVPSRFSGSGSGTDYSLTISNLEQEDIATYFCQQGNTLPYTFGGGTKLEITGGGGSGGGGSGGGGSEVKLQESGPGLVAPSQSLSVTCTVSGVSLPDYGVSWIRQPPRKGLEWLGVIWGSETTYYNSALKSRLTIIKDNSKSQVFLKMNSLQTDDTAIYYCAKHYYYGGSYAMDYWGQGTSVTVSSTTTPAPRPPTPAPTIASQPLSLRPEACRPAAGGAVHTRGLDFACDIYIWAPLAGTCGVLLLSLVITLYCKRGRKKLLYIFKQPFMRPVQTTQEEDGCSCRFPEEEEGGCELRVKFSRSADAPAYKQGQNQLYNELNLGRREEYDVLDKRRGRDPEMGGKPRRKNPQEGLYNELQKDKMAEAYSEIGMKGERRRGKGHDGLYQGLSTATKDTYDALHMQALPPR

SEQ ID NO: 282 - protein, 488 aa, Artificial Sequence
  source: /note="Description of Artificial Sequence: Synthetic polypeptide"
MALPVTALLLPLALLLHAARPQVQLQQSGAEVKKPGASVKVSCKASGYTFTGYYMHWVRQAPGQGLEWMGRINPNSGGTNYAQKFQGRVTMTRDTSISTAYMELSRLRSEDTAVYYCARGRYYGMDVWGQGTMVTVSSGGGGSGGGGSGGGGSGGGGSEIVLTQSPATLSLSPGERATISCRASQSVSSNFAWYQQRPGQAPRLLIYDASNRATGIPPRFSGSGSGTDFTLTISSLEPEDFAAYYCHQRSNWLYTFGQGTKVDIKTTTPAPRPPTPAPTIASQPLSLRPEACRPAAGGAVHTRGLDFACDIYIWAPLAGTCGVLLLSLVITLYCKRGRKKLLYIFKQPFMRPVQTTQEEDGCSCRFPEEEEGGCELRVKFSRSADAPAYKQGQNQLYNELNLGRREEYDVLDKRRGRDPEMGGKPRRKNPQEGLYNELQKDKMAEAYSEIGMKGERRRGKGHDGLYQGLSTATKDTYDALHMQALPPR

SEQ ID NO: 283 - protein, 497 aa, Artificial Sequence
  source: /note="Description of Artificial Sequence: Synthetic polypeptide"
MALPVTALLLPLALLLHAARPQVQLVQSGAEVKKPGASVKVSCKASGYTFTGYYMHWVRQAPGQGLEWMGWINPNSGGTNYAQKFQGRVTMTRDTSISTAYMELSRLRSDDTAVYYCARDLRRTVVTPRAYYGMDVWGQGTTVTVSSGGGGSGGGGSGGGGSGGGGSDIQLTQSPSTLSASVGDRVTITCQASQDISNSLNWYQQKAGKAPKLLIYDASTLETGVPSRFSGSGSGTDFSFTISSLQPEDIATYYCQQHDNLPLTFGQGTKVEIKTTTPAPRPPTPAPTIASQPLSLRPEACRPAAGGAVHTRGLDFACDIYIWAPLAGTCGVLLLSLVITLYCKRGRKKLLYIFKQPFMRPVQTTQEEDGCSCRFPEEEEGGCELRVKFSRSADAPAYKQGQNQLYNELNLGRREEYDVLDKRRGRDPEMGGKPRRKNPQEGLYNELQKDKMAEAYSEIGMKGERRRGKGHDGLYQGLSTATKDTYDALHMQALPPR

SEQ ID NO: 284 - protein, 490 aa, Artificial Sequence
  source: /note="Description of Artificial Sequence: Synthetic polypeptide"
MALPVTALLLPLALLLHAARPQVQLVQSGAEVKKPGAPVKVSCKASGYTFTGYYMHWVRQAPGQGLEWMGWINPNSGGTNYAQKFQGRVTMTRDTSISTAYMELSRLRSDDTAVYYCARGEWDGSYYYDYWGQGTLVTVSSGGGGSGGGGSGGGGSGGGGSDIVLTQTPSSLSASVGDRVTITCRASQSINTYLNWYQHKPGKAPKLLIYAASSLQSGVPSRFSGSGSGTDFTLTISSLQPEDFATYYCQQSFSPLTFGGGTKLEIKTTTPAPRPPTPAPTIASQPLSLRPEACRPAAGGAVHTRGLDFACDIYIWAPLAGTCGVLLLSLVITLYCKRGRKKLLYIFKQPFMRPVQTTQEEDGCSCRFPEEEEGGCELRVKFSRSADAPAYKQGQNQLYNELNLGRREEYDVLDKRRGRDPEMGGKPRRKNPQEGLYNELQKDKMAEAYSEIGMKGERRRGKGHDGLYQGLSTATKDTYDALHMQALPPR

SEQ ID NO: 285 - protein, 486 aa, Artificial Sequence
  source: /note="Description of Artificial Sequence: Synthetic polypeptide"
MALPVTALLLPLALLLHAARPQVQLVESGGGLVQPGGSLRLSCAASGFTFSSYWMHWVRQVPGKGLVWVSRINTDGSTTTYADSVEGRFTISRDNAKNTLYLQMNSLRDDDTAVYYCVGGHWAVWGQGTTVTVSSGGGGSGGGGSGGGGSGGGGSDIQMTQSPSTLSASVGDRVTITCRASQSISDRLAWYQQKPGKAPKLLIYKASSLESGVPSRFSGSGSGTEFTLTISSLQPDDFAVYYCQQYGHLPMYTFGQGTKVEIKTTTPAPRPPTPAPTIASQPLSLRPEACRPAAGGAVHTRGLDFACDIYIWAPLAGTCGVLLLSLVITLYCKRGRKKLLYIFKQPFMRPVQTTQEEDGCSCRFPEEEEGGCELRVKFSRSADAPAYKQGQNQLYNELNLGRREEYDVLDKRRGRDPEMGGKPRRKNPQEGLYNELQKDKMAEAYSEIGMKGERRRGKGHDGLYQGLSTATKDTYDALHMQALPPR

SEQ ID NO: 286 - protein, 485 aa, Artificial Sequence
  source: /note="Description of Artificial Sequence: Synthetic polypeptide"
MALPVTALLLPLALLLHAARPQVQLVQSGAEVEKPGASVKVSCKASGYTFTDYYMHWVRQAPGQGLEWMGWINPNSGGTNYAQKFQGRVTMTRDTSISTAYMELSRLRSDDTAVYYCASGWDFDYWGQGTLVTVSSGGGGSGGGGSGGGGSGGGGSDIVMTQSPSSLSASVGDRVTITCRASQSIRYYLSWYQQKPGKAPKLLIYTASILQNGVPSRFSGSGSGTDFTLTISSLQPEDFATYYCLQTYTTPDFGPGTKVEIKTTTPAPRPPTPAPTIASQPLSLRPEACRPAAGGAVHTRGLDFACDIYIWAPLAGTCGVLLLSLVITLYCKRGRKKLLYIFKQPFMRPVQTTQEEDGCSCRFPEEEEGGCELRVKFSRSADAPAYKQGQNQLYNELNLGRREEYDVLDKRRGRDPEMGGKPRRKNPQEGLYNELQKDKMAEAYSEIGMKGERRRGKGHDGLYQGLSTATKDTYDALHMQALPPR

SEQ ID NO: 287 - protein, 497 aa, Artificial Sequence
  source: /note="Description of Artificial Sequence: Synthetic polypeptide"
MALPVTALLLPLALLLHAARPQVQLVQSGAEVKKPGASVKVSCKASGYTFTSYYMHWVRQAPGQGLEWMGIINPSGGSTSYAQKFQGRVTMTRDTSTSTVYMELSSLRSEDTAVYYCARYRLIAVAGDYYYYGMDVWGQGTMVTVSSGGGGSGGGGSGGGGSGGGGSDIQMTQSPSSVSASVGDRVTITCRASQGVGRWLAWYQQKPGTAPKLLIYAASTLQSGVPSRFSGSGSGTDFTLTINNLQPEDFATYYCQQANSFPLTFGGGTRLEIKTTTPAPRPPTPAPTIASQPLSLRPEACRPAAGGAVHTRGLDFACDIYIWAPLAGTCGVLLLSLVITLYCKRGRKKLLYIFKQPFMRPVQTTQEEDGCSCRFPEEEEGGCELRVKFSRSADAPAYKQGQNQLYNELNLGRREEYDVLDKRRGRDPEMGGKPRRKNPQEGLYNELQKDKMAEAYSEIGMKGERRRGKGHDGLYQGLSTATKDTYDALHMQALPPR

SEQ ID NO: 288 - protein, 494 aa, Artificial Sequence
  source: /note="Description of Artificial Sequence: Synthetic polypeptide"
MALPVTALLLPLALLLHAARPQVQLVQSGGGVVQPGRSLRLSCAASGFTFSSYAMHWVRQAPGKGLEWVAVISYDGSNKYYADSVKGRFTISRDNSKNTLYLQMNSLRAEDTAVYYCARWKVSSSSPAFDYWGQGTLVTVSSGGGGSGGGGSGGGGSGGGGSEIVLTQSPATLSLSPGERAILSCRASQSVYTKYLGWYQQKPGQAPRLLIYDASTRATGIPDRFSGSGSGTDFTLTINRLEPEDFAVYYCQHYGGSPLITFGQGTRLEIKTTTPAPRPPTPAPTIASQPLSLRPEACRPAAGGAVHTRGLDFACDIYIWAPLAGTCGVLLLSLVITLYCKRGRKKLLYIFKQPFMRPVQTTQEEDGCSCRFPEEEEGGCELRVKFSRSADAPAYKQGQNQLYNELNLGRREEYDVLDKRRGRDPEMGGKPRRKNPQEGLYNELQKDKMAEAYSEIGMKGERRRGKGHDGLYQGLSTATKDTYDALHMQALPPR

SEQ ID NO: 289 - protein, 490 aa, Artificial Sequence
  source: /note="Description of Artificial Sequence: Synthetic polypeptide"
MALPVTALLLPLALLLHAARPQVQLQQSGAEVKKPGASVKVSCKTSGYPFTGYSLHWVRQAPGQGLEWMGWINPNSGGTNYAQKFQGRVTMTRDTSISTAYMELSRLRSDDTAVYYCARDHYGGNSLFYWGQGTLVTVSSGGGGSGGGGSGGGGSGGGGSDIQLTQSPSSISASVGDTVSITCRASQDSGTWLAWYQQKPGKAPNLLMYDASTLEDGVPSRFSGSASGTEFTLTVNRLQPEDSATYYCQQYNSYPLTFGGGTKVDIKTTTPAPRPPTPAPTIASQPLSLRPEACRPAAGGAVHTRGLDFACDIYIWAPLAGTCGVLLLSLVITLYCKRGRKKLLYIFKQPFMRPVQTTQEEDGCSCRFPEEEEGGCELRVKFSRSADAPAYKQGQNQLYNELNLGRREEYDVLDKRRGRDPEMGGKPRRKNPQEGLYNELQKDKMAEAYSEIGMKGERRRGKGHDGLYQGLSTATKDTYDALHMQALPPR

SEQ ID NO: 290 - protein, 492 aa, Artificial Sequence
  source: /note="Description of Artificial Sequence: Synthetic polypeptide"
MALPVTALLLPLALLLHAARPQVQLVQSGAEVKKPGASVEVSCKASGYTFTSYYMHWVRQAPGQGLEWMGIINPSGGSTGYAQKFQGRVTMTRDTSTSTVHMELSSLRSEDTAVYYCARGGYSSSSDAFDIWGQGTMVTVSSGGGGSGGGGSGGGGSGGGGSDIQMTQSPPSLSASVGDRVTITCRASQDISSALAWYQQKPGTPPKLLIYDASSLESGVPSRFSGSGSGTDFTLTISSLQPEDFATYYCQQFSSYPLTFGGGTRLEIKTTTPAPRPPTPAPTIASQPLSLRPEACRPAAGGAVHTRGLDFACDIYIWAPLAGTCGVLLLSLVITLYCKRGRKKLLYIFKQPFMRPVQTTQEEDGCSCRFPEEEEGGCELRVKFSRSADAPAYKQGQNQLYNELNLGRREEYDVLDKRRGRDPEMGGKPRRKNPQEGLYNELQKDKMAEAYSEIGMKGERRRGKGHDGLYQGLSTATKDTYDALHMQALPPR

SEQ ID NO: 291 - protein, 499 aa, Artificial Sequence
  source: /note="Description of Artificial Sequence: Synthetic polypeptide"
MALPVTALLLPLALLLHAARPQVQLVQSGAEVKKPGASVKVSCKASGYTFTSYGISWVRQAPGQGLEWMGWISAYNGNTNYAQKLQGRVTMTTDTSTSTAYMELRSLRSDDTAVYYCARVAGGIYYYYGMDVWGQGTTITVSSGGGGSGGGGSGGGGSGGGGSDIVMTQTPDSLAVSLGERATISCKSSHSVLYNRNNKNYLAWYQQKPGQPPKLLFYWASTRKSGVPDRFSGSGSGTDFTLTISSLQPEDFATYFCQQTQTFPLTFGQGTRLEINTTTPAPRPPTPAPTIASQPLSLRPEACRPAAGGAVHTRGLDFACDIYIWAPLAGTCGVLLLSLVITLYCKRGRKKLLYIFKQPFMRPVQTTQEEDGCSCRFPEEEEGGCELRVKFSRSADAPAYKQGQNQLYNELNLGRREEYDVLDKRRGRDPEMGGKPRRKNPQEGLYNELQKDKMAEAYSEIGMKGERRRGKGHDGLYQGLSTATKDTYDALHMQALPPR

SEQ ID NO: 292 - protein, 485 aa, Artificial Sequence
  source: /note="Description of Artificial Sequence: Synthetic polypeptide"
MALPVTALLLPLALLLHAARPQVQLQQSGAEVKKPGASVKVSCKASGYTFTGYYMHWVRQAPGQGLEWMGWINPNSGGTNYAQNFQGRVTMTRDTSISTAYMELRRLRSDDTAVYYCASGWDFDYWGQGTLVTVSSGGGGSGGGGSGGGGSGGGGSDIRMTQSPSSLSASVGDRVTITCRASQSIRYYLSWYQQKPGKAPKLLIYTASILQNGVPSRFSGSGSGTDFTLTISSLQPEDFATYYCLQTYTTPDFGPGTKVEIKTTTPAPRPPTPAPTIASQPLSLRPEACRPAAGGAVHTRGLDFACDIYIWAPLAGTCGVLLLSLVITLYCKRGRKKLLYIFKQPFMRPVQTTQEEDGCSCRFPEEEEGGCELRVKFSRSADAPAYKQGQNQLYNELNLGRREEYDVLDKRRGRDPEMGGKPRRKNPQEGLYNELQKDKMAEAYSEIGMKGERRRGKGHDGLYQGLSTATKDTYDALHMQALPPR

SEQ ID NO: 293 - protein, 490 aa, Artificial Sequence
  source: /note="Description of Artificial Sequence: Synthetic polypeptide"
MALPVTALLLPLALLLHAARPQVQLVQSGAEVKKPGASVKVSCKASGYTFTGYYMHWVRQAPGQGLEWMGRINPNSGGTNYAQKFQGRVTMTTDTSTSTAYMELRSLRSDDTAVYYCARTTTSYAFDIWGQGTMVTVSSGGGGSGGGGSGGGGSGGGGSDIQLTQSPSTLSASVGDRVTITCRASQSISTWLAWYQQKPGKAPNLLIYKASTLESGVPSRFSGSGSGTEFTLTISSLQPDDFATYYCQQYNTYSPYTFGQGTKLEIKTTTPAPRPPTPAPTIASQPLSLRPEACRPAAGGAVHTRGLDFACDIYIWAPLAGTCGVLLLSLVITLYCKRGRKKLLYIFKQPFMRPVQTTQEEDGCSCRFPEEEEGGCELRVKFSRSADAPAYKQGQNQLYNELNLGRREEYDVLDKRRGRDPEMGGKPRRKNPQEGLYNELQKDKMAEAYSEIGMKGERRRGKGHDGLYQGLSTATKDTYDALHMQALPPR

SEQ ID NO: 294 - protein, 493 aa, Artificial Sequence
  source: /note="Description of Artificial Sequence: Synthetic polypeptide"
MALPVTALLLPLALLLHAARPQVQLVQSGGGLVKPGGSLRLSCEASGFIFSDYYMGWIRQAPGKGLEWVSYIGRSGSSMYYADSVKGRFTFSRDNAKNSLYLQMNSLRAEDTAVYYCAASPVVAATEDFQHWGQGTLVTVSSGGGGSGGGGSGGGGSGGGGSDIVMTQTPATLSLSPGERATLSCRASQSVTSNYLAWYQQKPGQAPRLLLFGASTRATGIPDRFSGSGSGTDFTLTINRLEPEDFAMYYCQQYGSAPVTFGQGTKLEIKTTTPAPRPPTPAPTIASQPLSLRPEACRPAAGGAVHTRGLDFACDIYIWAPLAGTCGVLLLSLVITLYCKRGRKKLLYIFKQPFMRPVQTTQEEDGCSCRFPEEEEGGCELRVKFSRSADAPAYKQGQNQLYNELNLGRREEYDVLDKRRGRDPEMGGKPRRKNPQEGLYNELQKDKMAEAYSEIGMKGERRRGKGHDGLYQGLSTATKDTYDALHMQALPPR

SEQ ID NO: 295 - protein, 493 aa, Artificial Sequence
  source: /note="Description of Artificial Sequence: Synthetic polypeptide"
MALPVTALLLPLALLLHAARPQVQLVQSGAEVRAPGASVKISCKASGFTFRGYYIHWVRQAPGQGLEWMGIINPSGGSRAYAQKFQGRVTMTRDTSTSTVYMELSSLRSDDTAMYYCARTASCGGDCYYLDYWGQGTLVTVSSGGGGSGGGGSGGGGSGGGGSDIQMTQSPPTLSASVGDRVTITCRASENVNIWLAWYQQKPGKAPKLLIYKSSSLASGVPSRFSGSGSGAEFTLTISSLQPDDFATYYCQQYQSYPLTFGGGTKVDIKTTTPAPRPPTPAPTIASQPLSLRPEACRPAAGGAVHTRGLDFACDIYIWAPLAGTCGVLLLSLVITLYCKRGRKKLLYIFKQPFMRPVQTTQEEDGCSCRFPEEEEGGCELRVKFSRSADAPAYKQGQNQLYNELNLGRREEYDVLDKRRGRDPEMGGKPRRKNPQEGLYNELQKDKMAEAYSEIGMKGERRRGKGHDGLYQGLSTATKDTYDALHMQALPPR

SEQ ID NO: 296 - protein, 488 aa, Artificial Sequence
  source: /note="Description of Artificial Sequence: Synthetic polypeptide"
MALPVTALLLPLALLLHAARPQVQLVQSGGGLVQPGRSLRLSCAASGFTFDDYAMHWVRQAPGKGLEWVSGISWNSGSIGYADSVKGRFTISRDNAKNSLYLQMNSLRAEDTAVYYCAKDGSSSWSWGYFDYWGQGTLVTVSSGGGGSGGGGSGGGGSSSELTQDPAVSVALGQTVRTTCQGDALRSYYASWYQQKPGQAPMLVIYGKNNRPSGIPDRFSGSDSGDTASLTITGAQAEDEADYYCNSRDSSGYPVFGTGTKVTVLTTTPAPRPPTPAPTIASQPLSLRPEACRPAAGGAVHTRGLDFACDIYIWAPLAGTCGVLLLSLVITLYCKRGRKKLLYIFKQPFMRPVQTTQEEDGCSCRFPEEEEGGCELRVKFSRSADAPAYKQGQNQLYNELNLGRREEYDVLDKRRGRDPEMGGKPRRKNPQEGLYNELQKDKMAEAYSEIGMKGERRRGKGHDGLYQGLSTATKDTYDALHMQALPPR

SEQ ID NO: 297 - protein, 490 aa, Artificial Sequence
  source: /note="Description of Artificial Sequence: Synthetic polypeptide"
MALPVTALLLPLALLLHAARPEVQLVESGGGLVQPGRSLRLSCAASGFTFDDYAMHWVRQAPGKGLEWVSGISWNSGSTGYADSVKGRFTISRDNAKNSLYLQMNSLRAEDTALYYCAKDSSSWYGGGSAFDIWGQGTMVTVSSGGGGSGGGGSGGGGSSSELTQEPAVSVALGQTVRITCQGDSLRSYYASWYQQKPGQAPVLVIFGRSRRPSGIPDRFSGSSSGNTASLIITGAQAEDEADYYCNSRDNTANHYVFGTGTKLTVLTTTPAPRPPTPAPTIASQPLSLRPEACRPAAGGAVHTRGLDFACDIYIWAPLAGTCGVLLLSLVITLYCKRGRKKLLYIFKQPFMRPVQTTQEEDGCSCRFPEEEEGGCELRVKFSRSADAPAYKQGQNQLYNELNLGRREEYDVLDKRRGRDPEMGGKPRRKNPQEGLYNELQKDKMAEAYSEIGMKGERRRGKGHDGLYQGLSTATKDTYDALHMQALPPR

SEQ ID NO: 298 - protein, 490 aa, Artificial Sequence
  source: /note="Description of Artificial Sequence: Synthetic polypeptide"
MALPVTALLLPLALLLHAARPEVQLVESGGGLVQPGRSLRLSCAASGFTFDDYAMHWVRQAPGKGLEWVSGISWNSGSTGYADSVKGRFTISRDNAKNSLYLQMNSLRAEDTALYYCAKDSSSWYGGGSAFDIWGQGTMVTVSSGGGGSGGGGSGGGGSSSELTQDPAVSVALGQTVRITCQGDSLRSYYASWYQQKPGQAPVLVIYGKNNRPSGIPDRFSGSSSGNTASLTITGAQAEDEADYYCNSRGSSGNHYVFGTGTKVTVLTTTPAPRPPTPAPTIASQPLSLRPEACRPAAGGAVHTRGLDFACDIYIWAPLAGTCGVLLLSLVITLYCKRGRKKLLYIFKQPFMRPVQTTQEEDGCSCRFPEEEEGGCELRVKFSRSADAPAYKQGQNQLYNELNLGRREEYDVLDKRRGRDPEMGGKPRRKNPQEGLYNELQKDKMAEAYSEIGMKGERRRGKGHDGLYQGLSTATKDTYDALHMQALPPR

SEQ ID NO: 299 - protein, 495 aa, Artificial Sequence
  source: /note="Description of Artificial Sequence: Synthetic polypeptide"
MALPVTALLLPLALLLHAARPQVQLVQSGGGLVQPGGSLRLSCAASGFTFSSYWMHWVRQAPGKGLVWVSRINSDGSSTSYADSVKGRFTISRDNAKNTLYLQMNSLRAEDTAVYYCVRTGWVGSYYYYMDVWGKGTTVTVSSGGGGSGGGGSGGGGSGGGGSEIVLTQSPGTLSLSPGERATLSCRASQSVSSNYLAWYQQKPGQPPRLLIYDVSTRATGIPARFSGGGSGTDFTLTISSLEPEDFAVYYCQQRSNWPPWTFGQGTKVEIKTTTPAPRPPTPAPTIASQPLSLRPEACRPAAGGAVHTRGLDFACDIYIWAPLAGTCGVLLLSLVITLYCKRGRKKLLYIFKQPFMRPVQTTQEEDGCSCRFPEEEEGGCELRVKFSRSADAPAYKQGQNQLYNELNLGRREEYDVLDKRRGRDPEMGGKPRRKNPQEGLYNELQKDKMAEAYSEIGMKGERRRGKGHDGLYQGLSTATKDTYDALHMQALPPR

SEQ ID NO: 300 - protein, 494 aa, Artificial Sequence
  source: /note="Description of Artificial Sequence: Synthetic polypeptide"
MALPVTALLLPLALLLHAARPQVQLVQSGGGVVQPGRSLRLSCAASGFTFSSYGMHWVRQAPGKGLEWVAVISYDGSNKYYADSVKGRFTISRDNSKNTLYLQMNSLRAEDTAVYYCAKGYSRYYYYGMDVWGQGTTVTVSSGGGGSGGGGSGGGGSGGGGSEIVMTQSPATLSLSPGERAILSCRASQSVYTKYLGWYQQKPGQAPRLLIYDASTRATGIPDRFSGSGSGTDFTLTINRLEPEDFAVYYCQHYGGSPLITFGQGTKVDIKTTTPAPRPPTPAPTIASQPLSLRPEACRPAAGGAVHTRGLDFACDIYIWAPLAGTCGVLLLSLVITLYCKRGRKKLLYIFKQPFMRPVQTTQEEDGCSCRFPEEEEGGCELRVKFSRSADAPAYKQGQNQLYNELNLGRREEYDVLDKRRGRDPEMGGKPRRKNPQEGLYNELQKDKMAEAYSEIGMKGERRRGKGHDGLYQGLSTATKDTYDALHMQALPPR

SEQ ID NO: 301 - protein, 493 aa, Artificial Sequence
  source: /note="Description of Artificial Sequence: Synthetic polypeptide"
MALPVTALLLPLALLLHAARPQVQLVQSGGGLVQPGGSLRLSCAASGFTFSSYAMSWVRQAPGKGLEWVSAISGSGGSTYYADSVKGRFTISRDNSKNTLYLQMNSLRAEDTAVYYCAKREAAAGHDWYFDLWGRGTLVTVSSGGGGSGGGGSGGGGSGGGGSDIRVTQSPSSLSASVGDRVTITCRASQSISSYLNWYQQKPGKAPKLLIYAASSLQSGVPSRFSGSGSGTDFTLTISSLQPEDFATYYCQQSYSIPLTFGQGTKVEIKTTTPAPRPPTPAPTIASQPLSLRPEACRPAAGGAVHTRGLDFACDIYIWAPLAGTCGVLLLSLVITLYCKRGRKKLLYIFKQPFMRPVQTTQEEDGCSCRFPEEEEGGCELRVKFSRSADAPAYKQGQNQLYNELNLGRREEYDVLDKRRGRDPEMGGKPRRKNPQEGLYNELQKDKMAEAYSEIGMKGERRRGKGHDGLYQGLSTATKDTYDALHMQALPPR

SEQ ID NO: 302 - protein, 491 aa, Artificial Sequence
  source: /note="Description of Artificial Sequence: Synthetic polypeptide"
MALPVTALLLPLALLLHAARPQVQLVQSWAEVKKPGASVKVSCKASGYTFTSYYMHWVRQAPGQGLEWMGIINPSGGSTSYAQKFQGRVTMTRDTSTSTVYMELSNLRSEDTAVYYCARSPRVTTGYFDYWGQGTLVTVSSGGGGSGGGGSGGGGSGGGGSDIQLTQSPSTLSASVGDRVTITCRASQSISSWLAWYQQKPGKAPKLLIYKASSLESGVPSRFSGSGSGTEFTLTISSLQPDDFATYYCQQYSSYPLTFGGGTRLEIKTTTPAPRPPTPAPTIASQPLSLRPEACRPAAGGAVHTRGLDFACDIYIWAPLAGTCGVLLLSLVITLYCKRGRKKLLYIFKQPFMRPVQTTQEEDGCSCRFPEEEEGGCELRVKFSRSADAPAYKQGQNQLYNELNLGRREEYDVLDKRRGRDPEMGGKPRRKNPQEGLYNELQKDKMAEAYSEIGMKGERRRGKGHDGLYQGLSTATKDTYDALHMQALPPR

SEQ ID NO: 303 - protein, 497 aa, Artificial Sequence
  source: /note="Description of Artificial Sequence: Synthetic polypeptide"
MALPVTALLLPLALLLHAARPQVQLVQSGAEVRRPGASVKISCRASGDTSTRHYIHWLRQAPGQGPEWMGVINPTTGPATGSPAYAQMLQGRVTMTRDTSTRTVYMELRSLRFEDTAVYYCARSVVGRSAPYYFDYWGQGTLVTVSSGGGGSGGGGSGGGGSGGGGSDIQMTQSPSSLSASVGDRVTITCRASQGISDYSAWYQQKPGKAPKLLIYAASTLQSGVPSRFSGSGSGTDFTLTISYLQSEDFATYYCQQYYSYPLTFGGGTKVDIKTTTPAPRPPTPAPTIASQPLSLRPEACRPAAGGAVHTRGLDFACDIYIWAPLAGTCGVLLLSLVITLYCKRGRKKLLYIFKQPFMRPVQTTQEEDGCSCRFPEEEEGGCELRVKFSRSADAPAYKQGQNQLYNELNLGRREEYDVLDKRRGRDPEMGGKPRRKNPQEGLYNELQKDKMAEAYSEIGMKGERRRGKGHDGLYQGLSTATKDTYDALHMQALPPR

SEQ ID NO: 304 - protein, 493 aa, Artificial Sequence
  source: /note="Description of Artificial Sequence: Synthetic polypeptide"
MALPVTALLLPLALLLHAARPQVQLQQSGAEVKKPGASVKVSCKASGYTFTNYYMHWVRQAPGQGLEWMGIINPSGGYTTYAQKFQGRLTMTRDTSTSTVYMELSSLRSEDTAVYYCARIRSCGGDCYYFDNWGQGTLVTVSSGGGGSGGGGSGGGGSGGGGSDIQLTQSPSTLSASVGDRVTITCRASENVNIWLAWYQQKPGKAPKLLIYKSSSLASGVPSRFSGSGSGAEFTLTISSLQPDDFATYYCQQYQSYPLTFGGGTKVDIKTTTPAPRPPTPAPTIASQPLSLRPEACRPAAGGAVHTRGLDFACDIYIWAPLAGTCGVLLLSLVITLYCKRGRKKLLYIFKQPFMRPVQTTQEEDGCSCRFPEEEEGGCELRVKFSRSADAPAYKQGQNQLYNELNLGRREEYDVLDKRRGRDPEMGGKPRRKNPQEGLYNELQKDKMAEAYSEIGMKGERRRGKGHDGLYQGLSTATKDTYDALHMQALPPR

SEQ ID NO: 305 - protein, 490 aa, Artificial Sequence
  source: /note="Description of Artificial Sequence: Synthetic polypeptide"
MALPVTALLLPLALLLHAARPQITLKESGPALVKPTQTLTLTCTFSGFSLSTAGVHVGWIRQPPGKALEWLALISWADDKRYRPSLRSRLDITRVTSKDQVVLSMTNMQPEDTATYYCALQGFDGYEANWGPGTLVTVSSGGGGSGGGGSGGGGSGGGGSDIVMTQSPSSLSASAGDRVTITCRASRGISSALAWYQQKPGKPPKLLIYDASSLESGVPSRFSGSGSGTDFTLTIDSLEPEDFATYYCQQSYSTPWTFGQGTKVDIKTTTPAPRPPTPAPTIASQPLSLRPEACRPAAGGAVHTRGLDFACDIYIWAPLAGTCGVLLLSLVITLYCKRGRKKLLYIFKQPFMRPVQTTQEEDGCSCRFPEEEEGGCELRVKFSRSADAPAYKQGQNQLYNELNLGRREEYDVLDKRRGRDPEMGGKPRRKNPQEGLYNELQKDKMAEAYSEIGMKGERRRGKGHDGLYQGLSTATKDTYDALHMQALPPR

SEQ ID NO: 306 - protein, 383 aa, Artificial Sequence
  source: /note="Description of Artificial Sequence: Synthetic polypeptide"
MALPVTALLLPLALLLHAARPQVQLQQSGPELEKPGASVKISCKASGYSFTGYTMNWVKQSHGKSLEWIGLITPYNGASSYNQKFRGKATLTVDKSSSTAYMDLLSLTSEDSAVYFCARGGYDGRGFDYWGQGTTVTVSSGGGGSGGGGSGGGGSDIELTQSPAIMSASPGEKVTMTCSASSSVSYMHWYQQKSGTSPKRWIYDTSKLASGVPGRFSGSGSGNSYSLTISSVEAEDDATYYCQQWSGYPLTFGAGTKLEITTTPAPRPPTPAPTIASQPLSLRPEACRPAAGGAVHTRGLDFACDIYIWAPLAGTCGVLLLSLVITLYCKRGRKKLLYIFKQPFMRPVQTTQEEDGCSCRFPEEEEGGCELRVKFSRSADAPA

SEQ ID NO: 307-338 - skipped (32 entries)

SEQ ID NO: 339 - protein, 246 aa, Artificial Sequence
  source: /note="Description of Artificial Sequence: Synthetic polypeptide"
QVQLVESGGGLVQPGRSLRLSCAASGFTFSNYAMSWVRQAPGKGLGWVSGISRSGENTYYADSVKGRFTISRDNSKNTLYLQMNSLRDEDTAVYYCARSPAHYYGGMDVWGQGTTVTVSSASGGGGSGGRASGGGGSDIVLTQSPGTLSLSPGERATLSCRASQSISSSFLAWYQQKPGQAPRLLIYGASRRATGIPDRFSGSGSGTDFTLTISRLEPEDSAVYYCQQYHSSPSWTFGQGTKLEIK

SEQ ID NO: 340 - protein, 244 aa, Artificial Sequence
  source: /note="Description of Artificial Sequence: Synthetic polypeptide"
QVQLVESGGGLVQPGRSLRLSCAASGFTFDDYAMHWVRQAPGKGLEWVSGISWNSGSIGYADSVKGRFTISRDNAKNSLYLQMNSLRAEDTALYYCSVHSFLAYWGQGTLVTVSSASGGGGSGGRASGGGGSDIVMTQTPLSLPVTPGEPASISCRSSQSLLHSNGYNYLDWYLQKPGQSPQLLIYLGSNRASGVPDRFSGSGSGTDFTLKISRVEAEDVGVYYCMQALQTPYTFGQGTKVEIK

SEQ ID NO: 341 - protein, 243 aa, Artificial Sequence
  source: /note="Description of Artificial Sequence: Synthetic polypeptide"
EVQLLESGGGLVQPGGSLRLSCAVSGFALSNHGMSWVRRAPGKGLEWVSGIVYSGSTYYAASVKGRFTISRDNSRNTLYLQMNSLRPEDTAIYYCSAHGGESDVWGQGTTVTVSSASGGGGSGGRASGGGGSDIVMTQTPLSLSVTPGQPASISCKSSQSLLRNDGKTPLYWYLQKAGQPPQLLIYEVSNRFSGVPDRFSGSGSGTDFTLKISRVEAEDVGAYYCMQNIQFPSFGGGTKLEIK

SEQ ID NO: 342 - protein, 249 aa, Artificial Sequence
  source: /note="Description of Artificial Sequence: Synthetic polypeptide"
QVQLVQSGAEVRKTGASVKVSCKASGYIFDNFGINWVRQAPGQGLEWMGWINPKNNNTNYAQKFQGRVTITADESTNTAYMEVSSLRSEDTAVYYCARGPYYYQSYMDVWGQGTMVTVSSASGGGGSGGRASGGGGSDIVMTQTPLSLPVTPGEPASISCRSSQSLLHSNGYNYLNWYLQKPGQSPQLLIYLGSKRASGVPDRFSGSGSGTDFTLHITRVGAEDVGVYYCMQALQTPYTFGQGTKLEIK

SEQ ID NO: 343 - protein, 246 aa, Artificial Sequence
  source: /note="Description of Artificial Sequence: Synthetic polypeptide"
QVQLQESGGGLVQPGGSLRLSCAASGFTFSSDAMTWVRQAPGKGLEWVSVISGSGGTTYYADSVKGRFTISRDNSKNTLYLQMNSLRAEDTAVYYCAKLDSSGYYYARGPRYWGQGTLVTVSSASGGGGSGGRASGGGGSDIQLTQSPSSLSASVGDRVTITCRASQSISSYLNWYQQKPGKAPKLLIYGASTLASGVPARFSGSGSGTHFTLTINSLQSEDSATYYCQQSYKRASFGQGTKVEIK

SEQ ID NO: 344 - protein, 247 aa, Artificial Sequence
  source: /note="Description of Artificial Sequence: Synthetic polypeptide"
QVQLVQSGAEVKKPGASVKVSCKASGYTFSNYGITWVRQAPGQGLEWMGWISAYNGNTNYAQKFQGRVTMTRNTSISTAYMELSSLRSEDTAVYYCARGPYYYYMDVWGKGTMVTVSSASGGGGSGGRASGGGGSEIVMTQSPLSLPVTPGEPASISCRSSQSLLYSNGYNYVDWYLQKPGQSPQLLIYLGSNRASGVPDRFSGSGSGTDFKLQISRVEAEDVGIYYCMQGRQFPYSFGQGTKVEIK

SEQ ID NO: 345 - protein, 238 aa, Artificial Sequence
  source: /note="Description of Artificial Sequence: Synthetic polypeptide"
EVQLLETGGGLVQPGGSLRLSCAVSGFALSNHGMSWVRRAPGKGLEWVSGIVYSGSTYYAASVKGRFTISRDNSRNTLYLQMNSLRPEDTAIYYCSAHGGESDVWGQGTTVTVSSASGGGGSGGRASGGGGSEIVLTQSPATLSVSPGESATLSCRASQSVSSNLAWYQQKPGQAPRLLIYGASTRASGIPDRFSGSGSGTDFTLTISSLQAEDVAVYYCQQYGSSLTFGGGTKVEIK

SEQ ID NO: 346 - protein, 239 aa, Artificial Sequence
  source: /note="Description of Artificial Sequence: Synthetic polypeptide"
EVQLVETGGGLVQPGGSLRLSCAVSGFALSNHGMSWVRRAPGKGLEWVSGIVYSGSTYYAASVKGRFTISRDNSRNTLYLQMNSLRPEDTAIYYCSAHGGESDVWGQGTTVTVSSASGGGGSGGRASGGGGSEIVMTQSPATLSVSPGERATLSCRASQSVSSKLAWYQQKPGQAPRLLMYGASIRATGIPDRFSGSGSGTEFTLTISSLEPEDFAVYYCQQYGSSSWTFGQGTKVEIK

SEQ ID NO: 347 - protein, 241 aa, Artificial Sequence
  source: /note="Description of Artificial Sequence: Synthetic polypeptide"
EVQLVETGGGVVQPGGSLRLSCAVSGFALSNHGMSWVRRAPGKGLEWVSGIVYSGSTYYAASVKGRFTISRDNSRNTLYLQMNSLRPEDTAIYYCSAHGGESDVWGQGTTVTVSSASGGGGSGGRASGGGGSEIVLTQSPGTLSLSPGERATLSCRASQSVGSTNLAWYQQKPGQAPRLLIYDASNRATGIPDRFSGGGSGTDFTLTISRLEPEDFAVYYCQQYGSSPPWTFGQGTKVEIK

SEQ ID NO: 348 - protein, 239 aa, Artificial Sequence
  source: /note="Description of Artificial Sequence: Synthetic polypeptide"
QVQLVESGGGLVKPGGSLRLSCAASGFTFSDYYMSWIRQAPGKGLEWVSYISSSGSTIYYADSVKGRFTISRDNAKNSLYLQMNSLRAEDTAVYYCARESGDGMDVWGQGTTVTVSSASGGGGSGGRASGGGGSDIQMTQSPSSLSASVGDRVTITCRASQSISSYLNWYQQKPGKAPKLLIYAASSLQSGVPSRFSGSGSGTDFTLTISSLQPEDFATYYCQQSYTLAFGQGTKVDIK

SEQ ID NO: 349 - protein, 239 aa, Artificial Sequence
  source: /note="Description of Artificial Sequence: Synthetic polypeptide"
EVQLVESGGGLVQPGGSLRLSCAVSGFALSNHGMSWVRRAPGKGLEWVSGIVYSGSTYYAASVKGRFTISRDNSRNTLYLQMNSLRPEDTAIYYCSAHGGESDVWGQGTTVTVSSASGGGGSGGRASGGGGSDIQLTQSPSSLSASVGDRVTITCRASQSISSYLNWYQQKPGKAPKLLIYAASSLQSGVPSRFSGSGSGTDFTLTISSLQPEDFATYYCQQSYSTPYTFGQGTKVEIK

SEQ ID NO: 350 - protein, 246 aa, Artificial Sequence
  source: /note="Description of Artificial Sequence: Synthetic polypeptide"
QVQLVQSGGGLVKPGGSLRLSCAASGFTFSDYYMSWIRQAPGKGLEWVSYISSSGNTIYYADSVKGRFTISRDNAKNSLYLQMNSLRAEDTAVYYCARSTMVREDYWGQGTLVTVSSASGGGGSGGRASGGGGSDIVLTQSPLSLPVTLGQPASISCKSSESLVHNSGKTYLNWFHQRPGQSPRRLIYEVSNRDSGVPDRFTGSGSGTDFTLKISRVEAEDVGVYYCMQGTHWPGTFGQGTKLEIK

SEQ ID NO: 351 - protein, 239 aa, Artificial Sequence
  source: /note="Description of Artificial Sequence: Synthetic polypeptide"
QVQLVESGGGLVQPGGSLRLSCAVSGFALSNHGMSWVRRAPGKGLEWVSGIVYSGSTYYAASVKGRFTISRDNSRNTLYLQMNSLRPEDTAIYYCSAHGGESDVWGQGTTVTVSSASGGGGSGGRASGGGGSDIRLTQSPSPLSASVGDRVTITCQASEDINKFLNWYHQTPGKAPKLLIYDASTLQTGVPSRFSGSGSGTDFTLTINSLQPEDIGTYYCQQYESLPLTFGGGTKVEIK

SEQ ID NO: 352 - protein, 240 aa, Artificial Sequence
  source: /note="Description of Artificial Sequence: Synthetic polypeptide"
EVQLVETGGGLVQPGGSLRLSCAVSGFALSNHGMSWVRRAPGKGLEWVSGIVYSGSTYYAASVKGRFTISRDNSRNTLYLQMNSLRPEDTAIYYCSAHGGESDVWGQGTTVTVSSASGGGGSGGRASGGGGSETTLTQSPATLSVSPGERATLSCRASQSVGSNLAWYQQKPGQGPRLLIYGASTRATGIPARFSGSGSGTEFTLTISSLQPEDFAVYYCQQYNDWLPVTFGQGTKVEIK

SEQ ID NO: 353 - protein, 241 aa, Artificial Sequence
  source: /note="Description of Artificial Sequence: Synthetic polypeptide"
EVQLVESGGGLVQPGGSLRLSCAVSGFALSNHGMSWVRRAPGKGLEWVSGIVYSGSTYYAASVKGRFTISRDNSRNTLYLQMNSLRPEDTAIYYCSAHGGESDVWGQGTTVTVSSASGGGGSGGRASGGGGSEIVLTQSPGTLSLSPGERATLSCRASQSIGSSSLAWYQQKPGQAPRLLMYGASSRASGIPDRFSGSGSGTDFTLTISRLEPEDFAVYYCQQYAGSPPFTFGQGTKVEIK

SEQ ID NO: 354 - DNA, 738 bp, Artificial Sequence
  source: /note="Description of Artificial Sequence: Synthetic polynucleotide"
caagtgcaactcgtggaatctggtggaggactcgtgcaacccggaagatcgcttagactgtcgtgtgccgccagcgggttcactttctcgaactacgcgatgtcctgggtccgccaggcacccggaaagggactcggttgggtgtccggcatttcccggtccggcgaaaatacctactacgccgactccgtgaagggccgcttcaccatctcaagggacaacagcaaaaacaccctgtacttgcaaatgaactccctgcgggatgaagatacagccgtgtactattgcgcccggtcgcctgcccattactacggcggaatggacgtctggggacagggaaccactgtgactgtcagcagcgcgtcgggtggcggcggctcagggggtcgggcctccggggggggagggtccgacatcgtgctgacccagtccccgggaaccctgagcctgagcccgggagagcgcgcgaccctgtcatgccgggcatcccagagcattagctcctcctttctcgcctggtatcagcagaagcccggacaggccccgaggctgctgatctacggcgctagcagaagggctaccggaatcccagaccggttctccggctccggttccgggaccgatttcacccttactatctcgcgcctggaacctgaggactccgccgtctactactgccagcagtaccactcatccccgtcgtggacgttcggacagggcaccaagctggagattaag

SEQ ID NO: 355 - DNA, 732 bp, Artificial Sequence
  source: /note="Description of Artificial Sequence: Synthetic polynucleotide"
caagtgcaactcgtcgaatccggtggaggtctggtccaacctggtagaagcctgagactgtcgtgtgcggccagcggattcacctttgatgactatgctatgcactgggtgcggcaggccccaggaaagggcctggaatgggtgtcgggaattagctggaactccgggtccattggctacgccgactccgtgaagggccgcttcaccatctcccgcgacaacgcaaagaactccctgtacttgcaaatgaactcgctcagggctgaggataccgcgctgtactactgctccgtgcattccttcctggcctactggggacagggaactctggtcaccgtgtcgagcgcctccggcggcgggggctcgggtggacgggcctcgggcggaggggggtccgacatcgtgatgacccagaccccgctgagcttgcccgtgactcccggagagcctgcatccatctcctgccggtcatcccagtcccttctccactccaacggatacaactacctcgactggtacctccagaagccgggacagagccctcagcttctgatctacctggggtcaaatagagcctcaggagtgccggatcggttcagcggatctggttcgggaactgatttcactctgaagatttcccgcgtggaagccgaggacgtgggcgtctactactgtatgcaggcgctgcagaccccctataccttcggccaagggacgaaagtggagatcaag

SEQ ID NO: 356 - DNA, 729 bp, Artificial Sequence
  source: /note="Description of Artificial Sequence: Synthetic polynucleotide"
gaagtgcaattgttggaatctggaggaggacttgtgcagcctggaggatcactgagactttcgtgtgcggtgtcaggcttcgccctgagcaaccacggcatgagctgggtgcggagagccccggggaagggtctggaatgggtgtccgggatcgtctactccggttcaacttactacgccgcaagcgtgaagggtcgcttcaccatttcccgcgataactcccggaacaccctgtacctccaaatgaactccctgcggcccgaggacaccgccatctactactgttccgcgcatggaggagagtccgatgtctggggacagggcactaccgtgaccgtgtcgagcgcctcggggggaggaggctccggcggtcgcgcctccggggggggtggcagcgacattgtgatgacgcagactccactctcgctgtccgtgaccccgggacagcccgcgtccatctcgtgcaagagctcccagagcctgctgaggaacgacggaaagactcctctgtattggtacctccagaaggctggacagcccccgcaactgctcatctacgaagtgtcaaatcgcttctccggggtgccggatcggttttccggctcgggatcgggcaccgacttcaccctgaaaatctccagggtcgaggccgaggacgtgggagcctactactgcatgcaaaacatccagttcccttccttcggcggcggcacaaagctggagattaag

SEQ ID NO: 357 - DNA, 747 bp, Artificial Sequence
  source: /note="Description of Artificial Sequence: Synthetic polynucleotide"
caagtccaactcgtccagtccggcgcagaagtcagaaaaaccggtgctagcgtgaaagtgtcctgcaaggcctccggctacattttcgataacttcggaatcaactgggtcagacaggccccgggccaggggctggaatggatgggatggatcaaccccaagaacaacaacaccaactacgcacagaagttccagggccgcgtgactatcaccgccgatgaatcgaccaataccgcctacatggaggtgtcctccctgcggtcggaggacactgccgtgtattactgcgcgaggggcccatactactaccaaagctacatggacgtctggggacagggaaccatggtgaccgtgtcatccgcctccggtggtggaggctccggggggcgggcttcaggaggcggaggaagcgatattgtgatgacccagactccgcttagcctgcccgtgactcctggagaaccggcctccatttcctgccggtcctcgcaatcactcctgcattccaacggttacaactacctgaattggtacctccagaagcctggccagtcgccccagttgctgatctatctgggctcgaagcgcgcctccggggtgcctgaccggtttagcggatctgggagcggcacggacttcactctccacatcacccgcgtgggagcggaggacgtgggagtgtactactgtatgcaggcgctgcagactccgtacacattcggacagggcaccaagctggagatcaag

SEQ ID NO: 358 - DNA, 738 bp, Artificial Sequence
  source: /note="Description of Artificial Sequence: Synthetic polynucleotide"
caagtgcaacttcaagaatcaggcggaggactcgtgcagcccggaggatcattgcggctctcgtgcgccgcctcgggcttcaccttctcgagcgacgccatgacctgggtccgccaggccccggggaaggggctggaatgggtgtctgtgatttccggctccgggggaactacgtactacgccgattccgtgaaaggtcgcttcactatctcccgggacaacagcaagaacaccctttatctgcaaatgaattccctccgcgccgaggacaccgccgtgtactactgcgccaagctggactcctcgggctactactatgcccggggtccgagatactggggacagggaaccctcgtgaccgtgtcctccgcgtccggcggaggagggtcgggagggcgggcctccggcggcggcggttcggacatccagctgacccagtccccatcctcactgagcgcaagcgtgggcgacagagtcaccattacatgcagggcgtcccagagcatcagctcctacctgaactggtaccaacagaagcctggaaaggctcctaagctgttgatctacggggcttcgaccctggcatccggggtgcccgcgaggtttagcggaagcggtagcggcactcacttcactctgaccattaacagcctccagtccgaggattcagccacttactactgtcagcagtcctacaagcgggccagcttcggacagggcactaaggtcgagatcaag

SEQ ID NO: 359 - DNA, 741 bp, Artificial Sequence
  source: /note="Description of Artificial Sequence: Synthetic polynucleotide"
caagtccaactggtccagagcggtgcagaagtgaagaagcccggagcgagcgtgaaagtgtcctgcaaggcttccgggtacaccttctccaactacggcatcacttgggtgcgccaggccccgggacagggcctggaatggatggggtggatttccgcgtacaacggcaatacgaactacgctcagaagttccagggtagagtgaccatgactaggaacacctccatttccaccgcctacatggaactgtcctccctgcggagcgaggacaccgccgtgtactattgcgcccggggaccatactactactacatggatgtctgggggaaggggactatggtcaccgtgtcatccgcctcgggaggcggcggatcaggaggacgcgcctctggtggtggaggatcggagatcgtgatgacccagagccctctctccttgcccgtgactcctggggagcccgcatccatttcatgccggagctcccagtcacttctctactccaacggctataactacgtggattggtacctccaaaagccgggccagagcccgcagctgctgatctacctgggctcgaacagggccagcggagtgcctgaccggttctccgggtcgggaagcgggaccgacttcaagctgcaaatctcgagagtggaggccgaggacgtgggaatctactactgtatgcagggccgccagtttccgtactcgttcggacagggcaccaaagtggaaatcaag

SEQ ID NO: 360 - DNA, 714 bp, Artificial Sequence
  source: /note="Description of Artificial Sequence: Synthetic polynucleotide"
gaagtgcaattgctcgaaactggaggaggtctggtgcaacctggaggatcacttcgcctgtcctgcgccgtgtcgggctttgccctgtccaaccatggaatgagctgggtccgccgcgcgccggggaagggcctcgaatgggtgtccggcatcgtctactccggctccacctactacgccgcgtccgtgaagggccggttcacgatttcacgggacaactcgcggaacaccctgtacctccaaatgaattcccttcggccggaggatactgccatctactactgctccgcccacggtggcgaatccgacgtctggggccagggaaccaccgtgaccgtgtccagcgcgtccgggggaggaggaagcgggggtagagcatcgggtggaggcggatcagagatcgtgctgacccagtcccccgccaccttgagcgtgtcaccaggagagtccgccaccctgtcatgccgcgccagccagtccgtgtcctccaacctggcttggtaccagcagaagccggggcaggcccctagactcctgatctatggggcgtcgacccgggcatctggaattcccgataggttcagcggatcgggctcgggcactgacttcactctgaccatctcctcgctgcaagccgaggacgtggctgtgtactactgtcagcagtacggaagctccctgactttcggtggcgggaccaaagtcgagattaag

SEQ ID NO: 361 - DNA, 717 bp, Artificial Sequence
  source: /note="Description of Artificial Sequence: Synthetic polynucleotide"
gaagtgcaattggtggaaactggaggaggacttgtgcaacctggaggatcattgagactgagctgcgcagtgtcgggattcgccctgagcaaccatggaatgtcctgggtcagaagggcccctggaaaaggcctcgaatgggtgtcagggatcgtgtactccggttccacttactacgccgcctccgtgaaggggcgcttcactatctcacgggataactcccgcaataccctgtacctccaaatgaacagcctgcggccggaggataccgccatctactactgttccgcccacggtggagagtctgacgtctggggccagggaactaccgtgaccgtgtcctccgcgtccggcggtggagggagcggcggccgcgccagcggcggcggaggctccgagatcgtgatgacccagagccccgctactctgtcggtgtcgcccggagaaagggcgaccctgtcctgccgggcgtcgcagtccgtgagcagcaagctggcttggtaccagcagaagccgggccaggcaccacgcctgcttatgtacggtgcctccattcgggccaccggaatcccggaccggttctcggggtcggggtccggtaccgagttcacactgaccatttcctcgctcgagcccgaggactttgccgtctattactgccagcagtacggctcctcctcatggacgttcggccaggggaccaaggtcgaaatcaag

SEQ ID NO: 362 - DNA, 723 bp, Artificial Sequence
  source: /note="Description of Artificial Sequence: Synthetic polynucleotide"
gaagtgcaattggtggagactggaggaggagtggtgcaacctggaggaagcctgagactgtcatgcgcggtgtcgggcttcgccctctccaaccacggaatgtcctgggtccgccgggcccctgggaaaggacttgaatgggtgtccggcatcgtgtactcgggttccacctactacgcggcctcagtgaagggccggtttactattagccgcgacaactccagaaacacactgtacctccaaatgaactcgctgcggccggaagataccgctatctactactgctccgcccatgggggagagtcggacgtctggggacagggcaccactgtcactgtgtccagcgcttccggcggtggtggaagcgggggacgggcctcaggaggcggtggcagcgagattgtgctgacccagtcccccgggaccctgagcctgtccccgggagaaagggccaccctctcctgtcgggcatcccagtccgtggggtctactaaccttgcatggtaccagcagaagcccggccaggcccctcgcctgctgatctacgacgcgtccaatagagccaccggcatcccggatcgcttcagcggaggcggatcgggcaccgacttcaccctcaccatttcaaggctggaaccggaggacttcgccgtgtactactgccagcagtatggttcgtccccaccctggacgttcggccaggggactaaggtcgagatcaag

SEQ ID NO: 363 - DNA, 717 bp, Artificial Sequence
  source: /note="Description of Artificial Sequence: Synthetic polynucleotide"
caagtgcaactcgtggaatctggtggaggactcgtgaaacctggaggatcattgagactgtcatgcgcggcctcgggattcacgttctccgattactacatgagctggattcgccaggctccggggaagggactggaatgggtgtcctacatttcctcatccggctccaccatctactacgcggactccgtgaaggggagattcaccattagccgcgataacgccaagaacagcctgtaccttcagatgaactccctgcgggctgaagatactgccgtctactactgcgcaagggagagcggagatgggatggacgtctggggacagggtaccactgtgaccgtgtcgtcggcctccggcggagggggttcgggtggaagggccagcggcggcggaggcagcgacatccagatgacccagtccccctcatcgctgtccgcctccgtgggcgaccgcgtcaccatcacatgccgggcctcacagtcgatctcctcctacctcaattggtatcagcagaagcccggaaaggcccctaagcttctgatctacgcagcgtcctccctgcaatccggggtcccatctcggttctccggctcgggcagcggtaccgacttcactctgaccatctcgagcctgcagccggaggacttcgccacttactactgtcagcaaagctacaccctcgcgtttggccagggcaccaaagtggacatcaag

SEQ ID NO: 364 - DNA, 717 bp, Artificial Sequence
  source: /note="Description of Artificial Sequence: Synthetic polynucleotide"
gaagtgcaattggtggaatcagggggaggacttgtgcagcctggaggatcgctgagactgtcatgtgccgtgtccggctttgccctgtccaaccacgggatgtcctgggtccgccgcgcgcctggaaagggcctcgaatgggtgtcgggtattgtgtacagcggtagcacctactatgccgcatccgtgaaggggagattcaccatcagccgggacaactccaggaacactctgtacctccaaatgaattcgctgaggccagaggacactgccatctactactgctccgcgcatggcggagagtccgacgtctggggacaggggaccaccgtgaccgtgtctagcgcgtccggcggaggcggcagcgggggtcgggcatcagggggcggcggatcggacatccagctcacccagtccccgagctcgctgtccgcctccgtgggagatcgggtcaccatcacgtgccgcgccagccagtcgatttcctcctacctgaactggtaccaacagaagcccggaaaagccccgaagcttctcatctacgccgcctcgagcctgcagtcaggagtgccctcacggttctccggctccggttccggtactgatttcaccctgaccatttcctccctgcaaccggaggacttcgctacttactactgccagcagtcgtactccaccccctacactttcggacaaggcaccaaggtcgaaatcaag

SEQ ID NO: 365 - DNA, 738 bp, Artificial Sequence
  source: /note="Description of Artificial Sequence: Synthetic polynucleotide"
caagtgcaactggtgcaaagcggaggaggattggtcaaacccggaggaagcctgagactgtcatgcgcggcctctggattcaccttctccgattactacatgtcatggatcagacaggccccggggaagggcctcgaatgggtgtcctacatctcgtcctccgggaacaccatctactacgccgacagcgtgaagggccgctttaccatttcccgcgacaacgcaaagaactcgctgtaccttcagatgaattccctgcgggctgaagataccgcggtgtactattgcgcccggtccactatggtccgggaggactactggggacagggcacactcgtgaccgtgtccagcgcgagcgggggtggaggcagcggtggacgcgcctccggcggcggcggttcagacatcgtgctgactcagtcgcccctgtcgctgccggtcaccctgggccaaccggcctcaattagctgcaagtcctcggagagcctggtgcacaactcaggaaagacttacctgaactggttccatcagcggcctggacagtccccacggaggctcatctatgaagtgtccaacagggattcgggggtgcccgaccgcttcactggctccgggtccggcaccgacttcaccttgaaaatctccagagtggaagccgaggacgtgggcgtgtactactgtatgcagggtacccactggcctggaacctttggacaaggaactaagctcgagattaag

SEQ ID NO: 366 - DNA, 717 bp, Artificial Sequence
  source: /note="Description of Artificial Sequence: Synthetic polynucleotide"
caagtgcaactcgtggaatctggtggaggactcgtgcaacccggtggaagccttaggctgtcgtgcgccgtcagcgggtttgctctgagcaaccatggaatgtcctgggtccgccgggcaccgggaaaagggctggaatgggtgtccggcatcgtgtacagcgggtcaacctattacgccgcgtccgtgaagggcagattcactatctcaagagacaacagccggaacaccctgtacttgcaaatgaattccctgcgccccgaggacaccgccatctactactgctccgcccacggaggagagtcggacgtgtggggccagggaacgactgtgactgtgtccagcgcatcaggagggggtggttcgggcggccgggcctcggggggaggaggttccgacattcggctgacccagtccccgtccccactgtcggcctccgtcggcgaccgcgtgaccatcacttgtcaggcgtccgaggacattaacaagttcctgaactggtaccaccagacccctggaaaggcccccaagctgctgatctacgatgcctcgacccttcaaactggagtgcctagccggttctccgggtccggctccggcactgatttcactctgaccatcaactcattgcagccggaagatatcgggacctactattgccagcagtacgaatccctcccgctcacattcggcgggggaaccaaggtcgagattaag

SEQ ID NO: 367 - DNA, 720 bp, Artificial Sequence
  source: /note="Description of Artificial Sequence: Synthetic polynucleotide"
gaagtgcaattggtggaaactggaggaggacttgtgcaacctggaggatcattgcggctctcatgcgctgtctccggcttcgccctgtcaaatcacgggatgtcgtgggtcagacgggccccgggaaagggtctggaatgggtgtcggggattgtgtacagcggctccacctactacgccgcttcggtcaagggccgcttcactatttcacgggacaacagccgcaacaccctctatctgcaaatgaactctctccgcccggaggataccgccatctactactgctccgcacacggcggcgaatccgacgtgtggggacagggaaccactgtcaccgtgtcgtccgcatccggtggcggaggatcgggtggccgggcctccgggggcggcggcagcgagactaccctgacccagtcccctgccactctgtccgtgagcccgggagagagagccacccttagctgccgggccagccagagcgtgggctccaacctggcctggtaccagcagaagccaggacagggtcccaggctgctgatctacggagcctccactcgcgcgaccggcatccccgcgaggttctccgggtcgggttccgggaccgagttcaccctgaccatctcctccctccaaccggaggacttcgcggtgtactactgtcagcagtacaacgattggctgcccgtgacatttggacaggggacgaaggtggaaatcaaa

SEQ ID NO: 368 - DNA, 723 bp, Artificial Sequence
  source: /note="Description of Artificial Sequence: Synthetic polynucleotide"
gaagtgcaattggtggaatctggtggaggacttgtgcaacctggaggatcactgagactgtcatgcgcggtgtccggttttgccctgagcaatcatgggatgtcgtgggtccggcgcgcccccggaaagggtctggaatgggtgtcgggtatcgtctactccgggagcacttactacgccgcgagcgtgaagggccgcttcaccatttcccgcgataactcccgcaacaccctgtacttgcaaatgaactcgctccggcctgaggacactgccatctactactgctccgcacacggaggagaatccgacgtgtggggccagggaactaccgtgaccgtcagcagcgcctccggcggcgggggctcaggcggacgggctagcggcggcggtggctccgagatcgtgctgacccagtcgcctggcactctctcgctgagccccggggaaagggcaaccctgtcctgtcgggccagccagtccattggatcatcctccctcgcctggtatcagcagaaaccgggacaggctccgcggctgcttatgtatggggccagctcaagagcctccggcattcccgaccggttctccgggtccggttccggcaccgatttcaccctgactatctcgaggctggagccagaggacttcgccgtgtactactgccagcagtacgcggggtccccgccgttcacgttcggacagggaaccaaggtcgagatcaag

SEQ ID NO: 369 - protein, 120 aa, Artificial Sequence
  source: /note="Description of Artificial Sequence: Synthetic polypeptide"
QVQLVESGGGLVQPGRSLRLSCAASGFTFSNYAMSWVRQAPGKGLGWVSGISRSGENTYYADSVKGRFTISRDNSKNTLYLQMNSLRDEDTAVYYCARSPAHYYGGMDVWGQGTTVTVSS

SEQ ID NO: 370 - protein, 115 aa, Artificial Sequence
  source: /note="Description of Artificial Sequence: Synthetic polypeptide"
QVQLVESGGGLVQPGRSLRLSCAASGFTFDDYAMHWVRQAPGKGLEWVSGISWNSGSIGYADSVKGRFTISRDNAKNSLYLQMNSLRAEDTALYYCSVHSFLAYWGQGTLVTVSS

SEQ ID NO: 371 - protein, 115 aa, Artificial Sequence
  source: /note="Description of Artificial Sequence: Synthetic polypeptide"
EVQLLESGGGLVQPGGSLRLSCAVSGFALSNHGMSWVRRAPGKGLEWVSGIVYSGSTYYAASVKGRFTISRDNSRNTLYLQMNSLRPEDTAIYYCSAHGGESDVWGQGTTVTVSS

SEQ ID NO: 372 - protein, 120 aa, Artificial Sequence
  source: /note="Description of Artificial Sequence: Synthetic polypeptide"
QVQLVQSGAEVRKTGASVKVSCKASGYIFDNFGINWVRQAPGQGLEWMGWINPKNNNTNYAQKFQGRVTITADESTNTAYMEVSSLRSEDTAVYYCARGPYYYQSYMDVWGQGTMVTVSS

SEQ ID NO: 373 - protein, 123 aa, Artificial Sequence
  source: /note="Description of Artificial Sequence: Synthetic polypeptide"
QVQLQESGGGLVQPGGSLRLSCAASGFTFSSDAMTWVRQAPGKGLEWVSVISGSGGTTYYADSVKGRFTISRDNSKNTLYLQMNSLRAEDTAVYYCAKLDSSGYYYARGPRYWGQGTLVTVSS

SEQ ID NO: 374 - protein, 118 aa, Artificial Sequence
  source: /note="Description of Artificial Sequence: Synthetic polypeptide"
QVQLVQSGAEVKKPGASVKVSCKASGYTFSNYGITWVRQAPGQGLEWMGWISAYNGNTNYAQKFQGRVTMTRNTSISTAYMELSSLRSEDTAVYYCARGPYYYYMDVWGKGTMVTVSS

SEQ ID NO: 375 - protein, 115 aa, Artificial Sequence
  source: /note="Description of Artificial Sequence: Synthetic polypeptide"
EVQLLETGGGLVQPGGSLRLSCAVSGFALSNHGMSWVRRAPGKGLEWVSGIVYSGSTYYAASVKGRFTISRDNSRNTLYLQMNSLRPEDTAIYYCSAHGGESDVWGQGTTVTVSS

SEQ ID NO: 376 - protein, 115 aa, Artificial Sequence
  source: /note="Description of Artificial Sequence: Synthetic polypeptide"
EVQLVETGGGLVQPGGSLRLSCAVSGFALSNHGMSWVRRAPGKGLEWVSGIVYSGSTYYAASVKGRFTISRDNSRNTLYLQMNSLRPEDTAIYYCSAHGGESDVWGQGTTVTVSS

SEQ ID NO: 377 - protein, 115 aa, Artificial Sequence
  source: /note="Description of Artificial Sequence: Synthetic polypeptide"
EVQLVETGGGVVQPGGSLRLSCAVSGFALSNHGMSWVRRAPGKGLEWVSGIVYSGSTYYAASVKGRFTISRDNSRNTLYLQMNSLRPEDTAIYYCSAHGGESDVWGQGTTVTVSS

SEQ ID NO: 378 - protein, 117 aa, Artificial Sequence
  source: /note="Description of Artificial Sequence: Synthetic polypeptide"
QVQLVESGGGLVKPGGSLRLSCAASGFTFSDYYMSWIRQAPGKGLEWVSYISSSGSTIYYADSVKGRFTISRDNAKNSLYLQMNSLRAEDTAVYYCARESGDGMDVWGQGTTVTVSS

SEQ ID NO: 379 - protein, 115 aa, Artificial Sequence
  source: /note="Description of Artificial Sequence: Synthetic polypeptide"
EVQLVESGGGLVQPGGSLRLSCAVSGFALSNHGMSWVRRAPGKGLEWVSGIVYSGSTYYAASVKGRFTISRDNSRNTLYLQMNSLRPEDTAIYYCSAHGGESDVWGQGTTVTVSS

SEQ ID NO: 380 - protein, 117 aa, Artificial Sequence
  source: /note="Description of Artificial Sequence: Synthetic polypeptide"
QVQLVQSGGGLVKPGGSLRLSCAASGFTFSDYYMSWIRQAPGKGLEWVSYISSSGNTIYYADSVKGRFTISRDNAKNSLYLQMNSLRAEDTAVYYCARSTMVREDYWGQGTLVTVSS

SEQ ID NO: 381 - protein, 115 aa, Artificial Sequence
  source: /note="Description of Artificial Sequence: Synthetic polypeptide"
QVQLVESGGGLVQPGGSLRLSCAVSGFALSNHGMSWVRRAPGKGLEWVSGIVYSGSTYYAASVKGRFTISRDNSRNTLYLQMNSLRPEDTAIYYCSAHGGESDVWGQGTTVTVSS

SEQ ID NO: 382 - protein, 115 aa, Artificial Sequence; identical to SEQ ID NO: 376
  source: /note="Description of Artificial Sequence: Synthetic polypeptide"

SEQ ID NO: 383 - protein, 115 aa, Artificial Sequence; identical to SEQ ID NO: 379
  source: /note="Description of Artificial Sequence: Synthetic polypeptide"

SEQ ID NO: 384 - protein, 109 aa, Artificial Sequence
  source: /note="Description of Artificial Sequence: Synthetic polypeptide"
DIVLTQSPGTLSLSPGERATLSCRASQSISSSFLAWYQQKPGQAPRLLIYGASRRATGIPDRFSGSGSGTDFTLTISRLEPEDSAVYYCQQYHSSPSWTFGQGTKLEIK

SEQ ID NO: 385 - protein, 112 aa, Artificial Sequence
  source: /note="Description of Artificial Sequence: Synthetic polypeptide"
DIVMTQTPLSLPVTPGEPASISCRSSQSLLHSNGYNYLDWYLQKPGQSPQLLIYLGSNRASGVPDRFSGSGSGTDFTLKISRVEAEDVGVYYCMQALQTPYTFGQGTKVEIK

SEQ ID NO: 386 - protein, 111 aa, Artificial Sequence
  source: /note="Description of Artificial Sequence: Synthetic polypeptide"
DIVMTQTPLSLSVTPGQPASISCKSSQSLLRNDGKTPLYWYLQKAGQPPQLLIYEVSNRFSGVPDRFSGSGSGTDFTLKISRVEAEDVGAYYCMQNIQFPSFGGGTKLEIK

SEQ ID NO: 387 - protein, 112 aa, Artificial Sequence
  source: /note="Description of Artificial Sequence: Synthetic polypeptide"
DIVMTQTPLSLPVTPGEPASISCRSSQSLLHSNGYNYLNWYLQKPGQSPQLLIYLGSKRASGVPDRFSGSGSGTDFTLHITRVGAEDVGVYYCMQALQTPYTFGQGTKLEIK

SEQ ID NO: 388 - protein, 106 aa, Artificial Sequence
  source: /note="Description of Artificial Sequence: Synthetic polypeptide"
DIQLTQSPSSLSASVGDRVTITCRASQSISSYLNWYQQKPGKAPKLLIYGASTLASGVPARFSGSGSGTHFTLTINSLQSEDSATYYCQQSYKRASFGQGTKVEIK

SEQ ID NO: 389 - protein, 112 aa, Artificial Sequence
  source: /note="Description of Artificial Sequence: Synthetic polypeptide"
EIVMTQSPLSLPVTPGEPASISCRSSQSLLYSNGYNYVDWYLQKPGQSPQLLIYLGSNRASGVPDRFSGSGSGTDFKLQISRVEAEDVGIYYCMQGRQFPYSFGQGTKVEIK

SEQ ID NO: 390 - protein, 106 aa, Artificial Sequence
  source: /note="Description of Artificial Sequence: Synthetic polypeptide"
EIVLTQSPATLSVSPGESATLSCRASQSVSSNLAWYQQKPGQAPRLLIYGASTRASGIPDRFSGSGSGTDFTLTISSLQAEDVAVYYCQQYGSSLTFGGGTKVEIK

SEQ ID NO: 391 - protein, 107 aa, Artificial Sequence
  source: /note="Description of Artificial Sequence: Synthetic polypeptide"
EIVMTQSPATLSVSPGERATLSCRASQSVSSKLAWYQQKPGQAPRLLMYGASIRATGIPDRFSGSGSGTEFTLTISSLEPEDFAVYYCQQYGSSSWTFGQGTKVEIK

SEQ ID NO: 392 - protein, 109 aa, Artificial Sequence
  source: /note="Description of Artificial Sequence: Synthetic polypeptide"
EIVLTQSPGTLSLSPGERATLSCRASQSVGSTNLAWYQQKPGQAPRLLIYDASNRATGIPDRFSGGGSGTDFTLTISRLEPEDFAVYYCQQYGSSPPWTFGQGTKVEIK

SEQ ID NO: 393 - protein, 105 aa, Artificial Sequence
  source: /note="Description of Artificial Sequence: Synthetic polypeptide"
DIQMTQSPSSLSASVGDRVTITCRASQSISSYLNWYQQKPGKAPKLLIYAASSLQSGVPSRFSGSGSGTDFTLTISSLQPEDFATYYCQQSYTLAFGQGTKVDIK

SEQ ID NO: 394 - protein, 107 aa, Artificial Sequence
  source: /note="Description of Artificial Sequence: Synthetic polypeptide"
DIQLTQSPSSLSASVGDRVTITCRASQSISSYLNWYQQKPGKAPKLLIYAASSLQSGVPSRFSGSGSGTDFTLTISSLQPEDFATYYCQQSYSTPYTFGQGTKVEIK

SEQ ID NO: 395 - protein, 112 aa, Artificial Sequence
  source: /note="Description of Artificial Sequence: Synthetic polypeptide"
DIVLTQSPLSLPVTLGQPASISCKSSESLVHNSGKTYLNWFHQRPGQSPRRLIYEVSNRDSGVPDRFTGSGSGTDFTLKISRVEAEDVGVYYCMQGTHWPGTFGQGTKLEIK

SEQ ID NO: 396 - protein, 107 aa, Artificial Sequence
  source: /note="Description of Artificial Sequence: Synthetic polypeptide"
DIRLTQSPSPLSASVGDRVTITCQASEDINKFLNWYHQTPGKAPKLLIYDASTLQTGVPSRFSGSGSGTDFTLTINSLQPEDIGTYYCQQYESLPLTFGGGTKVEIK

SEQ ID NO: 397 - protein, 108 aa, Artificial Sequence
  source: /note="Description of Artificial Sequence: Synthetic polypeptide"
ETTLTQSPATLSVSPGERATLSCRASQSVGSNLAWYQQKPGQGPRLLIYGASTRATGIPARFSGSGSGTEFTLTISSLQPEDFAVYYCQQYNDWLPVTFGQGTKVEIK

SEQ ID NO: 398 - protein, 109 aa, Artificial Sequence
  source: /note="Description of Artificial Sequence: Synthetic polypeptide"
EIVLTQSPGTLSLSPGERATLSCRASQSIGSSSLAWYQQKPGQAPRLLMYGASSRASGIPDRFSGSGSGTDFTLTISRLEPEDFAVYYCQQYAGSPPFTFGQGTKVEIK

SEQ ID NO: 399-428 - skipped (30 entries)

SEQ ID NO: 429 - protein, 243 aa, Artificial Sequence
  source: /note="Description of Artificial Sequence: Synthetic polypeptide"
QVQLQESGPGLVKPSETLSLTCTVSGGSISSSYYYWGWIRQPPGKGLEWIGSIYYSGSAYYNPSLKSRVTISVDTSKNQFSLRLSSVTAADTAVYYCARHWQEWPDAFDIWGQGTMVTVSSGGGGSGGGGSGGGGSETTLTQSPAFMSATPGDKVIISCKASQDIDDAMNWYQQKPGEAPLFIIQSATSPVPGIPPRFSGSGFGTDFSLTINNIESEDAAYYFCLQHDNFPLTFGQGTKLEIK

SEQ ID NO: 430 - protein, 245 aa, Artificial Sequence
  source: /note="Description of Artificial Sequence: Synthetic polypeptide"
QVNLRESGPALVKPTQTLTLTCTFSGFSLRTSGMCVSWIRQPPGKALEWLARIDWDEDKFYSTSLKTRLTISKDTSDNQVVLRMTNMDPADTATYYCARSGAGGTSATAFDIWGPGTMVTVSSGGGGSGGGGSGGGGSDIQMTQSPSSLSASVGDRVTITCRASQDIYNNLAWFQLKPGSAPRSLMYAANKSQSGVPSRFSGSASGTDFTLTISSLQPEDFATYYCQHYYRFPYSFGQGTKLEIK

SEQ ID NO: 431 - protein, 246 aa, Artificial Sequence
  source: /note="Description of Artificial Sequence: Synthetic polypeptide"
EVQLVESGGGLVKPGGSLRLSCAASGFTFSSYSMNWVRQAPGKGLEWVSSISSSSSYIYYADSVKGRFTISRDNAKNSLYLQMNSLRAEDTAVYYCAKTIAAVYAFDIWGQGTTVTVSSGGGGSGGGGSGGGGSEIVLTQSPLSLPVTPEEPASISCRSSQSLLHSNGYNYLDWYLQKPGQSPQLLIYLGSNRASGVPDRFSGSGSGTDFTLKISRVEAEDVGVYYCMQALQTPYTFGQGTKLEIK

SEQ ID NO: 432 - protein, 240 aa, Artificial Sequence
  source: /note="Description of Artificial Sequence: Synthetic polypeptide"
EVQLVESGGGLVKPGGSLRLSCAASGFTFSDYYMSWIRQAPGKGLEWVSYISSSGSTIYYADSVKGRFTISRDNAKNSLYLQMNSLRAEDTAVYYCARDLRGAFDIWGQGTMVTVSSGGGGSGGGGSGGGGSSYVLTQSPSVSAAPGYTATISCGGNNIGTKSVHWYQQKPGQAPLLVIRDDSVRPSKIPGRFSGSNSGNMATLTISGVQAGDEADFYCQVWDSDSEHVVFGGGTKLTVL

SEQ ID NO: 433 - protein, 241 aa, Artificial Sequence
  source: /note="Description of Artificial Sequence: Synthetic polypeptide"
QVQLVQSGAEVKKPGASVKVSCKPSGYTVTSHYIHWVRRAPGQGLEWMGMINPSGGVTAYSQTLQGRVTMTSDTSSSTVYMELSSLRSEDTAMYYCAREGSGSGWYFDFWGRGTLVTVSSGGGGSGGGGSGGGGSSYVLTQPPSVSVSPGQTASITCSGDGLSKKYVSWYQQKAGQSPVVLISRDKERPSGIPDRFSGSNSADTATLTISGTQAMDEADYYCQAWDDTTVVFGGGTKLTVL

SEQ ID NO: 434 - protein, 245 aa, Artificial Sequence
  source: /note="Description of Artificial Sequence: Synthetic polypeptide"
QVQLQESGPGLVKPSQTLSLTCTVSGGSISSGGYYWSWIRQHPGKGLEWIGYIYYSGSTYYNPSLKSRVTISVDTSKNQFSLKLSSVTAADTAVYYCARAGIAARLRGAFDIWGQGTMVTVSSGGGGSGGGGSGGGGSDIVMTQSPSSVSASVGDRVIITCRASQGIRNWLAWYQQKPGKAPNLLIYAASNLQSGVPSRFSGSGSGADFTLTISSLQPEDVATYYCQKYNSAPFTFGPGTKVDIK

SEQ ID NO: 435 - protein, 253 aa, Artificial Sequence
  source: /note="Description of Artificial Sequence: Synthetic polypeptide"
QVQLVQSGAEVKKPGSSVKVSCKASGGTFSSYAISWVRQAPGQGLEWMGGIIPIFGTANYAQKFQGRVTITADESTSTAYMELSSLRSEDTAVYYCARRGGYQLLRWDVGLLRSAFDIWGQGTMVTVSSGGGGSGGGGSGGGGSSYVLTQPPSVSVAPGQTARITCGGNNIGSKSVHWYQQKPGQAPVLVLYGKNNRPSGVPDRFSGSRSGTTASLTITGAQAEDEADYYCSSRDSSGDHLRVFGTGTKVTVL

SEQ ID NO: 436 - protein, 248 aa, Artificial Sequence
  source: /note="Description of Artificial Sequence: Synthetic polypeptide"
EVQLQQSGPGLVKPSQTLSLTCAISGDSVSSNSAAWNWIRQSPSRGLEWLGRTYYRSKWYSFYAISLKSRIIINPDTSKNQFSLQLKSVTPEDTAVYYCARSSPEGLFLYWFDPWGQGTLVTVSSGGDGSGGGGSGGGGSSSELTQDPAVSVALGQTIRITCQGDSLGNYYATWYQQKPGQAPVLVIYGTNNRPSGIPDRFSASSSGNTASLTITGAQAEDEADYYCNSRDSSGHHLLFGTGTKVTVL

SEQ ID NO: 437 - protein, 246 aa, Artificial Sequence
  source: /note="Description of Artificial Sequence: Synthetic polypeptide"
EVQLVESGGGLVQPGGSLRLSCAASGFTFSSYAMSWVRQAPGKGLEWVSAISGSGGSTYYADSVKGRFTISRDNSKNTLYLQMNSLRAEDTAVYYCAKVEGSGSLDYWGQGTLVTVSSGGGGSGGGGSGGGGSEIVMTQSPGTLSLSPGERATLSCRASQSVSSAYLAWYQQKPGQPPRLLISGASTRATGIPDRFGGSGSGTDFTLTISRLEPEDFAVYYCQHYGSSFNGSSLFTFGQGTRLEIK

SEQ ID NO: 438 - protein, 241 aa, Artificial Sequence
  source: /note="Description of Artificial Sequence: Synthetic polypeptide"
EVQLVETGGGLVQPGGSLRLSCAASGITFSRYPMSWVRQAPGKGLEWVSGISDSGVSTYYADSAKGRFTISRDNSKNTLFLQMSSLRDEDTAVYYCVTRAGSEASDIWGQGTMVTVSSGGGGSGGGGSGGGGSEIVLTQSPATLSLSPGERATLSCRASQSVSNSLAWYQQKPGQAPRLLIYDASSRATGIPDRFSGSGSGTDFTLTISRLEPEDFAIYYCQQFGTSSGLTFGGGTKLEIK

SEQ ID NO: 439 - protein, 248 aa, Artificial Sequence
  source: /note="Description of Artificial Sequence: Synthetic polypeptide"
QVQLVESGGGLVQPGGSLRLSCAASGFTFSSYAMSWVRQAPGKGLEWVSAISGSGGSTYYADSVKGRFTISRDNAKNSLYLQMNSLRAEDTAIYYCARATYKRELRYYYGMDVWGQGTMVTVSSGGGGSGGGGSGGGGSEIVMTQSPGTVSLSPGERATLSCRASQSVSSSFLAWYQQKPGQAPRLLIYGASSRATGIPDRFSGSGSGTDFTLTISRLEPEDSAVYYCQQYHSSPSWTFGQGTRLEIK

SEQ ID NO: 440 - protein, 248 aa, Artificial Sequence
  source: /note="Description of Artificial Sequence: Synthetic polypeptide"
EVQLVETGGGLVQPGGSLRLSCAASGFTFSSYAMSWVRQAPGKGLEWVSAISGSGGSTYYADSVKGRFTISRDNSKNTLYLQMNTLKAEDTAVYYCARATYKRELRYYYGMDVWGQGTTVTVSSGGGGSGGGGSGGGGSEIVLTQSPSTLSLSPGESATLSCRASQSVSTTFLAWYQQKPGQAPRLLIYGSSNRATGIPDRFSGSGSGTDFTLTIRRLEPEDFAVYYCQQYHSSPSWTFGQGTKVEIK

SEQ ID NO: 441 - protein, 239 aa, Artificial Sequence
  source: /note="Description of Artificial Sequence: Synthetic polypeptide"
EVQLVETGGGLVQPGRSLRLSCAASGFTFDDYAMHWVRQAPGKGLEWVSGISWNSGSIGYADSVKGRFTISRDNAKNSLYLQMNSLRDEDTAVYYCARVGKAVPDVWGQGTTVTVSSGGGGSGGGGSGGGGSDIVMTQTPSSLSASVGDRVTITCRASQSISSYLNWYQQKPGKAPKLLIYAASSLQSGVPSRFSGSGSGTDFTLTISSLQPEDFATYYCQQSYSTPYSFGQGTRLEIK

SEQ ID NO: 442 - protein, 246 aa, Artificial Sequence
  source: /note="Description of Artificial Sequence: Synthetic polypeptide"
EVQLVESGGGLVQPGRSLRLSCTASGFTFDDYAMHWVRQRPGKGLEWVASINWKGNSLAYGDSVKGRFAISRDNAKNTVFLQMNSLRTEDTAVYYCASHQGVAYYNYAMDVWGRGTLVTVSSGGGGSGGGGSGGGGSEIVLTQSPGTLSLSPGERATLSCRATQSIGSSFLAWYQQRPGQAPRLLIYGASQRATGIPDRFSGRGSGTDFTLTISRVEPEDSAVYYCQHYESSPSWTFGQGTKVEIK

SEQ ID NO: 443 - protein, 241 aa, Artificial Sequence
  source: /note="Description of Artificial Sequence: Synthetic polypeptide"
EVQLVESGGGLVQPGGSLRLSCAASGFTFSSYAMSWVRQAPGKGLEWVSAISGSGGSTYYADSVKGRFTISRDNSKNTLYLQMNSLRAEDTAVYYCAKVVRDGMDVWGQGTTVTVSSGGGGSGGGGSGGGGSEIVLTQSPATLSLSPGERATLSCRASQSVSSSYLAWYQQKPGQAPRLLIYGASSRATGIPDRFSGNGSGTDFTLTISRLEPEDFAVYYCQQYGSPPRFTFGPGTKVDIK

SEQ ID NO: 444 - protein, 242 aa, Artificial Sequence
  source: /note="Description of Artificial Sequence: Synthetic polypeptide"
EVQLLESGGGLVQPGGSLRLSCAASGFTFSSYAMSWVRQAPGKGLEWVSAISGSGGSTYYADSVKGRFTISRDNSKNTLYLQMNSLRAEDTAVYYCAKIPQTGTFDYWGQGTLVTVSSGGGGSGGGGSGGGGSEIVLTQSPGTLSLSPGERATLSCRASQSVSSSYLAWYQQRPGQAPRLLIYGASSRATGIPDRFSGSGSGTDFTLTISRLEPEDFAVYYCQHYGSSPSWTFGQGTRLEIK

SEQ ID NO: 445 - protein, 248 aa, Artificial Sequence
  source: /note="Description of Artificial Sequence: Synthetic polypeptide"
EVQLVETGGGLVQPGGSLRLSCAASGFTFSSYAMSWVRQAPGKGLEWVSAISGSGGSTYYADSVKGRFTMSRENDKNSVFLQMNSLRVEDTGVYYCARANYKRELRYYYGMDVWGQGTMVTVSSGGGGSGGGGSGGGGSEIVMTQSPGTLSLSPGESATLSCRASQRVASNYLAWYQHKPGQAPSLLISGASSRATGVPDRFSGSGSGTDFTLAISRLEPEDSAVYYCQHYDSSPSWTFGQGTKVEIK

SEQ ID NO: 446 - protein, 244 aa, Artificial Sequence
  source: /note="Description of Artificial Sequence: Synthetic polypeptide"
EVQLLETGGGLVQPGGSLRLSCAASGFSFSSYAMSWVRQAPGKGLEWVSAISGSGGSTYYADSVKGRFTISRDNSKNTLYLQMNSLRAEDTAVYYCAKALVGATGAFDIWGQGTLVTVSSGGGGSGGGGSGGGGSEIVLTQSPGTLSLSPGERATLSCRASQSLSSNFLAWYQQKPGQAPGLLIYGASNWATGTPDRFSGSGSGTDFTLTITRLEPEDFAVYYCQYYGTSPMYTFGQGTKVEIK

SEQ ID NO: 447 - protein, 244 aa, Artificial Sequence
  source: /note="Description of Artificial Sequence: Synthetic polypeptide"
EVQLLESGGGLVQPGGSLRLSCAASGFTFSSYAMSWVRQAPGKGLEWVSAISGSGGSTYYADSVKGRFTISRDNSKNTLYLQMNSLRAEDTAVYYCVLWFGEGFDPWGQGTLVTVSSGGGGSGGGGSGGGGSDIVLTQSPLSLPVTPGEPASISCRSSQSLLHSNGYNYLDWYLQKPGQSPQLLIYLGSNRASGVPDRFSGSGSGTDFTLKISRVEAEDVGVYYCMQALQTPLTFGGGTKVDIK

SEQ ID NO: 448 - protein, 251 aa, Artificial Sequence
  source: /note="Description of Artificial Sequence: Synthetic polypeptide"
QVQLVESGGGLVQPGGSLRLSCAASGFTFSSYAMSWVRQAPGKGLEWVSAISGSGGSTYYADSVKGRFTISRDNSKNTLYLQMNSLRAEDTAVYYCAKVGYDSSGYYRDYYGMDVWGQGTTVTVSSGGGGSGGGGSGGGGSEIVLTQSPGTLSLSPGERATLSCRASQSVSSSYLAWYQQKPGQAPRLLIYGTSSRATGISDRFSGSGSGTDFTLTISRLEPEDFAVYYCQHYGNSPPKFTFGPGTKLEIK

SEQ ID NO: 449 - protein, 246 aa, Artificial Sequence
  source: /note="Description of Artificial Sequence: Synthetic polypeptide"
EVQLVESGGGLVQPGGSLRLSCAASGFTFSSYAMSWVRQAPGKGLEWVSAISGSGGSTYYADSVKGRFTISRDNSKNTLYLQMNSLRAEDTAVYYCAKMGWSSGYLGAFDIWGQGTTVTVSSGGGGSGGGGSGGGGSEIVLTQSPGTLSLSPGERATLSCRASQSVASSFLAWYQQKPGQAPRLLIYGASGRATGIPDRFSGSGSGTDFTLTISRLEPEDFAVYYCQHYGGSPRLTFGGGTKVDIK

SEQ ID NO: 450 - DNA, 729 bp, Artificial Sequence
  source: /note="Description of Artificial Sequence: Synthetic polynucleotide"
caagtgcagcttcaggaaagcggaccgggcctggtcaagccatccgaaactctctccctgacttgcactgtgtctggcggttccatctcatcgtcgtactactactggggctggattaggcagccgcccggaaagggactggagtggatcggaagcatctactattccggctcggcgtactacaaccctagcctcaagtcgagagtgaccatctccgtggatacctccaagaaccagttttccctgcgcctgagctccgtgaccgccgctgacaccgccgtgtactactgtgctcggcattggcaggaatggcccgatgccttcgacatttggggccagggcactatggtcactgtgtcatccgggggtggaggcagcgggggaggagggtccggggggggaggttcagagacaaccttgacccagtcacccgcattcatgtccgccactccgggagacaaggtcatcatctcgtgcaaagcgtcccaggatatcgacgatgccatgaattggtaccagcagaagcctggcgaagcgccgctgttcattatccaatccgcaacctcgcccgtgcctggaatcccaccgcggttcagcggcagcggtttcggaaccgacttttccctgaccattaacaacattgagtccgaggacgccgcctactacttctgcctgcaacacgacaacttccctctcacgttcggccagggaaccaagctggaaatcaag

SEQ ID NO: 451 - DNA, 735 bp, Artificial Sequence
  source: /note="Description of Artificial Sequence: Synthetic polynucleotide"
caagtcaatctgcgcgaatccggccccgccttggtcaagcctacccagaccctcactctgacctgtactttctccggcttctccctgcggacttccgggatgtgcgtgtcctggatcagacagcctccgggaaaggccctggagtggctcgctcgcattgactgggatgaggacaagttctactccacctcactcaagaccaggctgaccatcagcaaagatacctctgacaaccaagtggtgctccgcatgaccaacatggacccagccgacactgccacttactactgcgcgaggagcggagcgggcggaacctccgccaccgccttcgatatttggggcccgggtaccatggtcaccgtgtcaagcggaggaggggggtccgggggcggcggttccgggggaggcggatcggacattcagatgactcagtcaccatcgtccctgagcgctagcgtgggcgacagagtgacaatcacttgccgggcatcccaggacatctataacaaccttgcgtggttccagctgaagcctggttccgcaccgcggtcacttatgtacgccgccaacaagagccagtcgggagtgccgtcccggttttccggttcggcctcgggaactgacttcaccctgacgatctccagcctgcaacccgaggatttcgccacctactactgccagcactactaccgctttccctactcgttcggacagggaaccaagctggaaatcaag

SEQ ID NO: 452 - DNA, 738 bp, Artificial Sequence
  source: /note="Description of Artificial Sequence: Synthetic polynucleotide"
gaagtgcagcttgtcgaatccggggggggactggtcaagccgggcggatcactgagactgtcctgcgccgcgagcggcttcacgttctcctcctactccatgaactgggtccgccaagcccccgggaagggactggaatgggtgtcctctatctcctcgtcgtcgtcctacatctactacgccgactccgtgaagggaagattcaccatttcccgcgacaacgcaaagaactcactgtacttgcaaatgaactcactccgggccgaagatactgctgtgtactattgcgccaagactattgccgccgtctacgctttcgacatctggggccagggaaccaccgtgactgtgtcgtccggtggtggtggctcgggcggaggaggaagcggcggcggggggtccgagattgtgctgacccagtcgccactgagcctccctgtgacccccgaggaacccgccagcatcagctgccggtccagccagtccctgctccactccaacggatacaattacctcgattggtaccttcagaagcctggacaaagcccgcagctgctcatctacttgggatcaaaccgcgcgtcaggagtgcctgaccggttctccggctcgggcagcggtaccgatttcaccctgaaaatctccagggtggaggcagaggacgtgggagtgtattactgtatgcaggcgctgcagactccgtacacatttgggcagggcaccaagctggagatcaag

SEQ ID NO: 453 - DNA, 720 bp, Artificial Sequence
  source: /note="Description of Artificial Sequence: Synthetic polynucleotide"
gaagtccagctcgtggagtccggcggaggccttgtgaagcctggaggttcgctgagactgtcctgcgccgcctccggcttcaccttctccgactactacatgtcctggatcagacaggccccgggaaagggcctggaatgggtgtcctacatctcgtcatcgggcagcactatctactacgcggactcagtgaaggggcggttcaccatttcccgggataacgcgaagaactcgctgtatctgcaaatgaactcactgagggccgaggacaccgccgtgtactactgcgcccgcgatctccgcggggcatttgacatctggggacagggaaccatggtcacagtgtccagcggagggggaggatcgggtggcggaggttccgggggtggaggctcctcctacgtgctgactcagagcccaagcgtcagcgctgcgcccggttacacggcaaccatctcctgtggcggaaacaacattgggaccaagtctgtgcactggtatcagcagaagccgggccaagctcccctgttggtgatccgcgatgactccgtgcggcctagcaaaattccgggacggttctccggctccaacagcggcaatatggccactctcaccatctcgggagtgcaggccggagatgaagccgacttctactgccaagtctgggactcagactccgagcatgtggtgttcgggggcggaaccaagctgactgtgctc

SEQ ID NO: 454 - DNA, 723 bp, Artificial Sequence
  source: /note="Description of Artificial Sequence: Synthetic polynucleotide"
caagtgcagctggtgcagagcggggccgaagtcaagaagccgggagcctccgtgaaagtgtcctgcaagccttcgggatacaccgtgacctcccactacattcattgggtccgccgcgcccccggccaaggactcgagtggatgggcatgatcaaccctagcggcggagtgaccgcgtacagccagacgctgcagggacgcgtgactatgacctcggatacctcctcctccaccgtctatatggaactgtccagcctgcggtccgaggataccgccatgtactactgcgcccgggaaggatcaggctccgggtggtatttcgacttctggggaagaggcaccctcgtgactgtgtcatctgggggagggggttccggtggtggcggatcgggaggaggcggttcatcctacgtgctgacccagccaccctccgtgtccgtgagccccggccagactgcatcgattacatgtagcggcgacggcctctccaagaaatacgtgtcgtggtaccagcagaaggccggacagagcccggtggtgctgatctcaagagataaggagcggcctagcggaatcccggacaggttctcgggttccaactccgcggacactgctactctgaccatctcggggacccaggctatggacgaagccgattactactgccaagcctgggacgacactactgtcgtgtttggagggggcaccaagttgaccgtcctt

SEQ ID NO: 455 - DNA, 735 bp, Artificial Sequence
  source: /note="Description of Artificial Sequence: Synthetic polynucleotide"
caagtgcagcttcaggagagcggcccgggactcgtgaagccgtcccagaccctgtccctgacttgcaccgtgtcgggaggaagcatctcgagcggaggctactattggtcgtggattcggcagcaccctggaaagggcctggaatggatcggctacatctactactccggctcgacctactacaacccatcgctgaagtccagagtgacaatctcagtggacacgtccaagaatcagttcagcctgaagctctcttccgtgactgcggccgacaccgccgtgtactactgcgcacgcgctggaattgccgcccggctgaggggtgccttcgacatttggggacagggcaccatggtcaccgtgtcctccggcggcggaggttccgggggtggaggctcaggaggaggggggtccgacatcgtcatgactcagtcgccctcaagcgtcagcgcgtccgtcggggacagagtgatcatcacctgtcgggcgtcccagggaattcgcaactggctggcctggtatcagcagaagcccggaaaggcccccaacctgttgatctacgccgcctcaaacctccaatccggggtgccgagccgcttcagcggctccggttcgggtgccgatttcactctgaccatctcctccctgcaacctgaagatgtggctacctactactgccaaaagtacaactccgcaccttttactttcggaccggggaccaaagtggacattaag

SEQ ID NO: 456 - DNA, 759 bp, Artificial Sequence
  source: /note="Description of Artificial Sequence: Synthetic polynucleotide"
caagtgcagctggtccagtcgggcgccgaggtcaagaagcccgggagctctgtgaaagtgtcctgcaaggcctccgggggcacctttagctcctacgccatctcctgggtccgccaagcaccgggtcaaggcctggagtggatggggggaattatccctatcttcggcactgccaactacgcccagaagttccagggacgcgtgaccattaccgcggacgaatccacctccaccgcttatatggagctgtccagcttgcgctcggaagataccgccgtgtactactgcgcccggaggggtggataccagctgctgagatgggacgtgggcctcctgcggtcggcgttcgacatctggggccagggcactatggtcactgtgtccagcggaggaggcggatcgggaggcggcggatcagggggaggcggttccagctacgtgcttactcaacccccttcggtgtccgtggccccgggacagaccgccagaatcacttgcggaggaaacaacattgggtccaagagcgtgcattggtaccagcagaagccaggacaggcccctgtgctggtgctctacgggaagaacaatcggcccagcggagtgccggacaggttctcgggttcacgctccggtacaaccgcttcactgactatcaccggggcccaggcagaggatgaagcggactactactgttcctcccgggattcatccggcgaccacctccgggtgttcggaaccggaacgaaggtcaccgtgctg

SEQ ID NO: 457 - DNA, 744 bp, Artificial Sequence
  source: /note="Description of Artificial Sequence: Synthetic polynucleotide"
gaagtgcagctccaacagtcaggaccggggctcgtgaagccatcccagaccctgtccctgacttgtgccatctcgggagatagcgtgtcatcgaactccgccgcctggaactggattcggcagagcccgtcccgcggactggagtggcttggaaggacctactaccggtccaagtggtactctttctacgcgatctcgctgaagtcccgcattatcattaaccctgatacctccaagaatcagttctccctccaactgaaatccgtcacccccgaggacacagcagtgtattactgcgcacggagcagccccgaaggactgttcctgtattggtttgacccctggggccaggggactcttgtgaccgtgtcgagcggcggagatgggtccggtggcggtggttcggggggcggcggatcatcatccgaactgacccaggacccggctgtgtccgtggcgctgggacaaaccatccgcattacgtgccagggagactccctgggcaactactacgccacttggtaccagcagaagccgggccaagcccctgtgttggtcatctacgggaccaacaacagaccttccggcatccccgaccggttcagcgcttcgtcctccggcaacactgccagcctgaccatcactggagcgcaggccgaagatgaggccgactactactgcaacagcagagactcctcgggtcatcacctcttgttcggaactggaaccaaggtcaccgtgctg

SEQ ID NO: 458 - DNA, 738 bp, Artificial Sequence
  source: /note="Description of Artificial Sequence: Synthetic polynucleotide"
gaagtgcagctcgtggagtcaggaggcggcctggtccagccgggagggtcccttagactgtcatgcgccgcaagcggattcactttctcctcctatgccatgagctgggtccgccaagcccccggaaagggactggaatgggtgtccgccatctcggggtctggaggctcaacttactacgctgactccgtgaagggacggttcaccattagccgcgacaactccaagaacaccctctacctccaaatgaactccctgcgggccgaggataccgccgtctactactgcgccaaagtggaaggttcaggatcgctggactactggggacagggtactctcgtgaccgtgtcatcgggcggaggaggttccggcggtggcggctccggcggcggagggtcggagatcgtgatgacccagagccctggtactctgagcctttcgccgggagaaagggccaccctgtcctgccgcgcttcccaatccgtgtcctccgcgtacttggcgtggtaccagcagaagccgggacagccccctcggctgctgatcagcggggccagcacccgggcaaccggaatcccagacagattcgggggttccggcagcggcacagatttcaccctgactatttcgaggttggagcccgaggactttgcggtgtattactgtcagcactacgggtcgtcctttaatggctccagcctgttcacgttcggacaggggacccgcctggaaatcaag

SEQ ID NO: 459 - DNA, 723 bp, Artificial Sequence
  source: /note="Description of Artificial Sequence: Synthetic polynucleotide"
gaagtgcaactggtggaaaccggtggcggcctggtgcagcctggaggatcattgaggctgtcatgcgcggccagcggtattaccttctcccggtaccccatgtcctgggtcagacaggccccggggaaagggcttgaatgggtgtccgggatctcggactccggtgtcagcacttactacgccgactccgccaagggacgcttcaccatttcccgggacaactcgaagaacaccctgttcctccaaatgagctccctccgggacgaggatactgcagtgtactactgcgtgacccgcgccgggtccgaggcgtctgacatttggggacagggcactatggtcaccgtgtcgtccggcggagggggctcgggaggcggtggcagcggaggaggagggtccgagatcgtgctgacccaatccccggccaccctctcgctgagccctggagaaagggcaaccttgtcctgtcgcgcgagccagtccgtgagcaactccctggcctggtaccagcagaagcccggacaggctccgagacttctgatctacgacgcttcgagccgggccactggaatccccgaccgcttttcggggtccggctcaggaaccgatttcaccctgacaatctcacggctggagccagaggatttcgccatctattactgccagcagttcggtacttcctccggcctgactttcggaggcggcacgaagctcgaaatcaag

SEQ ID NO: 460 - DNA, 744 bp, Artificial Sequence
  source: /note="Description of Artificial Sequence: Synthetic polynucleotide"
caagtgcagctcgtggaatcgggtggcggactggtgcagccggggggctcacttagactgtcctgcgcggccagcggattcactttctcctcctacgccatgtcctgggtcagacaggcccctggaaagggcctggaatgggtgtccgcaatcagcggcagcggcggctcgacctattacgcggattcagtgaagggcagattcaccatttcccgggacaacgccaagaactccttgtaccttcaaatgaactccctccgcgcggaagataccgcaatctactactgcgctcgggccacttacaagagggaactgcgctactactacgggatggacgtctggggccagggaaccatggtcaccgtgtccagcggaggaggaggatcgggaggaggcggtagcgggggtggagggtcggagatcgtgatgacccagtcccccggcactgtgtcgctgtcccccggcgaacgggccaccctgtcatgtcgggccagccagtcagtgtcgtcaagcttcctcgcctggtaccagcagaaaccgggacaagctccccgcctgctgatctacggagccagcagccgggccaccggtattcctgaccggttctccggttcggggtccgggaccgactttactctgactatctctcgcctcgagccagaggactccgccgtgtattactgccagcagtaccactcctccccgtcctggacgttcggacagggcacaaggctggagattaag

SEQ ID NO: 461 - DNA, 744 bp, Artificial Sequence
  source: /note="Description of Artificial Sequence: Synthetic polynucleotide"
gaggtgcagcttgtggaaaccggtggcggactggtgcagcccggaggaagcctcaggctgtcctgcgccgcgtccggcttcaccttctcctcgtacgccatgtcctgggtccgccaggcccccggaaagggcctggaatgggtgtccgccatctctggaagcggaggttccacgtactacgcggacagcgtcaagggaaggttcacaatctcccgcgataattcgaagaacactctgtaccttcaaatgaacaccctgaaggccgaggacactgctgtgtactactgcgcacgggccacctacaagagagagctccggtactactacggaatggacgtctggggccagggaactactgtgaccgtgtcctcgggagggggtggctccggggggggcggctccggcggaggcggttccgagattgtgctgacccagtcaccttcaactctgtcgctgtccccgggagagagcgctactctgagctgccgggccagccagtccgtgtccaccaccttcctcgcctggtatcagcagaagccggggcaggcaccacggctcttgatctacgggtcaagcaacagagcgaccggaattcctgaccgcttctcggggagcggttcaggcaccgacttcaccctgactatccggcgcctggaacccgaagatttcgccgtgtattactgtcaacagtaccactcctcgccgtcctggacctttggccaaggaaccaaagtggaaatcaag

SEQ ID NO: 462 - DNA, 717 bp, Artificial Sequence
  source: /note="Description of Artificial Sequence: Synthetic polynucleotide"
gaagtgcagctcgtggaaactggaggtggactcgtgcagcctggacggtcgctgcggctgagctgcgctgcatccggcttcaccttcgacgattatgccatgcactgggtcagacaggcgccagggaagggacttgagtgggtgtccggtatcagctggaatagcggctcaatcggatacgcggactccgtgaagggaaggttcaccatttcccgcgacaacgccaagaactccctgtacttgcaaatgaacagcctccgggatgaggacactgccgtgtactactgcgcccgcgtcggaaaagctgtgcccgacgtctggggccagggaaccactgtgaccgtgtccagcggcgggggtggatcgggcggtggagggtccggtggagggggctcagatattgtgatgacccagaccccctcgtccctgtccgcctcggtcggcgaccgcgtgactatcacatgtagagcctcgcagagcatctccagctacctgaactggtatcagcagaagccggggaaggccccgaagctcctgatctacgcggcatcatcactgcaatcgggagtgccgagccggttttccgggtccggctccggcaccgacttcacgctgaccatttcttccctgcaacccgaggacttcgccacttactactgccagcagtcctactccaccccttactccttcggccaaggaaccaggctggaaatcaag

SEQ ID NO: 463 - DNA, 738 bp, Artificial Sequence
  source: /note="Description of Artificial Sequence: Synthetic polynucleotide"
gaagtgcagctcgtggagagcgggggaggattggtgcagcccggaaggtccctgcggctctcctgcactgcgtctggcttcaccttcgacgactacgcgatgcactgggtcagacagcgcccgggaaagggcctggaatgggtcgcctcaatcaactggaagggaaactccctggcctatggcgacagcgtgaagggccgcttcgccatttcgcgcgacaacgccaagaacaccgtgtttctgcaaatgaattccctgcggaccgaggataccgctgtgtactactgcgccagccaccagggcgtggcatactataactacgccatggacgtgtggggaagagggacgctcgtcaccgtgtcctccgggggcggtggatcgggtggaggaggaagcggtggcgggggcagcgaaatcgtgctgactcagagcccgggaactctttcactgtccccgggagaacgggccactctctcgtgccgggccacccagtccatcggctcctccttccttgcctggtaccagcagaggccaggacaggcgccccgcctgctgatctacggtgcttcccaacgcgccactggcattcctgaccggttcagcggcagagggtcgggaaccgatttcacactgaccatttcccgggtggagcccgaagattcggcagtctactactgtcagcattacgagtcctccccttcatggaccttcggtcaagggaccaaagtggagatcaag

SEQ ID NO: 464 - DNA, 723 bp, Artificial Sequence
  source: /note="Description of Artificial Sequence: Synthetic polynucleotide"
gaggtgcagttggtcgaaagcgggggcgggcttgtgcagcctggcggatcactgcggctgtcctgcgcggcatcaggcttcacgttttcttcctacgccatgtcctgggtgcgccaggcccctggaaagggactggaatgggtgtccgcgatttcggggtccggcgggagcacctactacgccgattccgtgaagggccgcttcactatctcgcgggacaactccaagaacaccctctacctccaaatgaatagcctgcgggccgaggataccgccgtctactattgcgctaaggtcgtgcgcgacggaatggacgtgtggggacagggtaccaccgtgacagtgtcctcggggggaggcggtagcggcggaggaggaagcggtggtggaggttccgagattgtgctgactcaatcacccgcgaccctgagcctgtcccccggcgaaagggccactctgtcctgtcgggccagccaatcagtctcctcctcgtacctggcctggtaccagcagaagccaggacaggctccgagactccttatctatggcgcatcctcccgcgccaccggaatcccggataggttctcgggaaacggatcggggaccgacttcactctcaccatctcccggctggaaccggaggacttcgccgtgtactactgccagcagtacggcagcccgcctagattcactttcggccccggcaccaaagtggacatcaag

SEQ ID NO: 465 - DNA, 726 bp, Artificial Sequence
  source: /note="Description of Artificial Sequence: Synthetic polynucleotide"
gaagtgcagctgctggagtccggcggtggattggtgcaaccggggggatcgctcagactgtcctgtgcggcgtcaggcttcaccttctcgagctacgccatgtcatgggtcagacaggcccctggaaagggtctggaatgggtgtccgccatttccgggagcgggggatctacatactacgccgatagcgtgaagggccgcttcaccatttcccgggacaactccaagaacactctctatctgcaaatgaactccctccgcgctgaggacactgccgtgtactactgcgccaaaatccctcagaccggcaccttcgactactggggacaggggactctggtcaccgtcagcagcggtggcggaggttcggggggaggaggaagcggcggcggagggtccgagattgtgctgacccagtcacccggcactttgtccctgtcgcctggagaaagggccaccctttcctgccgggcatcccaatccgtgtcctcctcgtacctggcctggtaccagcagaggcccggacaggccccacggcttctgatctacggagcaagcagccgcgcgaccggtatcccggaccggttttcgggctcgggctcaggaactgacttcaccctcaccatctcccgcctggaacccgaagatttcgctgtgtattactgccagcactacggcagctccccgtcctggacgttcggccagggaactcggctggagatcaag

SEQ ID NO: 466 - DNA, 744 bp, Artificial Sequence
  source: /note="Description of Artificial Sequence: Synthetic polynucleotide"
gaagtgcaactggtggaaaccggtggaggactcgtgcagcctggcggcagcctccggctgagctgcgccgcttcgggattcaccttttcctcctacgcgatgtcttgggtcagacaggcccccggaaaggggctggaatgggtgtcagccatctccggctccggcggatcaacgtactacgccgactccgtgaaaggccggttcaccatgtcgcgcgagaatgacaagaactccgtgttcctgcaaatgaactccctgagggtggaggacaccggagtgtactattgtgcgcgcgccaactacaagagagagctgcggtactactacggaatggacgtctggggacagggaactatggtgaccgtgtcatccggtggagggggaagcggcggtggaggcagcgggggcgggggttcagaaattgtcatgacccagtccccgggaactctttccctctcccccggggaatccgcgactttgtcctgccgggccagccagcgcgtggcctcgaactacctcgcatggtaccagcataagccaggccaagccccttccctgctgatttccggggctagcagccgcgccactggcgtgccggataggttctcgggaagcggctcgggtaccgatttcaccctggcaatctcgcggctggaaccggaggattcggccgtgtactactgccagcactatgactcatccccctcctggacattcggacagggcaccaaggtcgagatcaag

SEQ ID NO: 467 - DNA, 732 bp, Artificial Sequence
  source: /note="Description of Artificial Sequence: Synthetic polynucleotide"
gaagtgcagctgctcgaaaccggtggagggctggtgcagccagggggctccctgaggctttcatgcgccgctagcggattctccttctcctcttacgccatgtcgtgggtccgccaagcccctggaaaaggcctggaatgggtgtccgcgatttccgggagcggaggttcgacctattacgccgactccgtgaagggccgctttaccatctcccgggataactccaagaacactctgtacctccaaatgaactcgctgagagccgaggacaccgccgtgtattactgcgcgaaggcgctggtcggcgcgactggggcattcgacatctggggacagggaactcttgtgaccgtgtcgagcggaggcggcggctccggcggaggagggagcgggggcggtggttccgaaatcgtgttgactcagtccccgggaaccctgagcttgtcacccggggagcgggccactctctcctgtcgcgcctcccaatcgctctcatccaatttcctggcctggtaccagcagaagcccggacaggccccgggcctgctcatctacggcgcttcaaactgggcaacgggaacccctgatcggttcagcggaagcggatcgggtactgactttaccctgaccatcaccagactggaaccggaggacttcgccgtgtactactgccagtactacggcacctcccccatgtacacattcggacagggtaccaaggtcgagattaag

SEQ ID NO: 468 - DNA, 733 bp, Artificial Sequence
  source: /note="Description of Artificial Sequence: Synthetic polynucleotide"
gaagtgcagctgcttgagagcggtggaggtctggtgcagcccgggggatcactgcgcctgtcctgtgccgcgtccggtttcactttctcctcgtacgccatgtcgtgggtcagacaggcaccgggaaagggactggaatgggtgtcagccatttcgggttcggggggcagcacctactacgctgactccgtgaagggccggttcaccatttcccgcgacaactccaagaacaccttgtacctccaaatgaactccctgcgggccgaagataccgccgtgtattactgcgtgctgtggttcggagagggattcgacccgtggggacaaggaacactcgtgactgtgtcatccggcggaggcggcagcggtggcggcggttccggcggcggcggatctgacatcgtgttgacccagtcccctctgagcctgccggtcactcctggcgaaccagccagcatctcctgccggtcgagccagtccctcctgcactccaatgggtacaactacctcgattggtatctgcaaaagccgggccagagcccccagctgctgatctaccttgggtcaaaccgcgcttccggggtgcctgatagattctccgggtccgggagcggaaccgactttaccctgaaaatctcgagggtggaggccgaggacgtcggagtgtactactgcatgcaggcgctccagactcccctgaccttcggaggaggaacgaaggtcgacatcaaga

SEQ ID NO: 469 - DNA, 753 bp, Artificial Sequence
  source: /note="Description of Artificial Sequence: Synthetic polynucleotide"
caagtgcagctcgtggagtcaggcggaggactggtgcagcccgggggctccctgagactttcctgcgcggcatcgggttttaccttctcctcctatgctatgtcctgggtgcgccaggccccgggaaagggactggaatgggtgtccgcaatcagcggtagcgggggctcaacatactacgccgactccgtcaagggtcgcttcactatttcccgggacaactccaagaataccctgtacctccaaatgaacagcctcagggccgaggatactgccgtgtactactgcgccaaagtcggatacgatagctccggttactaccgggactactacggaatggacgtgtggggacagggcaccaccgtgaccgtgtcaagcggcggaggcggttcaggagggggaggctccggcggtggagggtccgaaatcgtcctgactcagtcgcctggcactctgtcgttgtccccgggggagcgcgctaccctgtcgtgtcgggcgtcgcagtccgtgtcgagctcctacctcgcgtggtaccagcagaagcccggacaggcccctagacttctgatctacggcacttcttcacgcgccaccgggatcagcgacaggttcagcggctccggctccgggaccgacttcaccctgaccattagccggctggagcctgaagatttcgccgtgtattactgccaacactacggaaactcgccgccaaagttcacgttcggacccggaaccaagctggaaatcaag

SEQ ID NO: 470 - DNA, 739 bp, Artificial Sequence
  source: /note="Description of Artificial Sequence: Synthetic polynucleotide"
gaagtccaactggtggagtccgggggagggctcgtgcagcccggaggcagccttcggctgtcgtgcgccgcctccgggttcacgttctcatcctacgcgatgtcgtgggtcagacaggcaccaggaaagggactggaatgggtgtccgccattagcggctccggcggtagcacctactatgccgactcagtgaagggaaggttcactatctcccgcgacaacagcaagaacaccctgtacctccaaatgaactctctgcgggccgaggataccgcggtgtactattgcgccaagatgggttggtccagcggatacttgggagccttcgacatttggggacagggcactactgtgaccgtgtcctccgggggtggcggatcgggaggcggcggctcgggtggagggggttccgaaatcgtgttgacccagtcaccgggaaccctctcgctgtccccgggagaacgggctacactgtcatgtagagcgtcccagtccgtggcttcctcgttcctggcctggtaccagcagaagccgggacaggcaccccgcctgctcatctacggagccagcggccgggcgaccggcatccctgaccgcttctccggttccggctcgggcaccgactttactctgaccattagcaggcttgagcccgaggattttgccgtgtactactgccaacactacggggggagccctcgcctgaccttcggaggcggaactaaggtcgatatcaaaa

SEQ ID NO: 471 - protein, 121 aa, Artificial Sequence
  source: /note="Description of Artificial Sequence: Synthetic polypeptide"
QVQLQESGPGLVKPSETLSLTCTVSGGSISSSYYYWGWIRQPPGKGLEWIGSIYYSGSAYYNPSLKSRVTISVDTSKNQFSLRLSSVTAADTAVYYCARHWQEWPDAFDIWGQGTMVTVSS

SEQ ID NO: 472 - protein, 123 aa, Artificial Sequence
  source: /note="Description of Artificial Sequence: Synthetic polypeptide"
QVNLRESGPALVKPTQTLTLTCTFSGFSLRTSGMCVSWIRQPPGKALEWLARIDWDEDKFYSTSLKTRLTISKDTSDNQVVLRMTNMDPADTATYYCARSGAGGTSATAFDIWGPGTMVTVSS

SEQ ID NO: 473 - protein, 119 aa, Artificial Sequence
  source: /note="Description of Artificial Sequence: Synthetic polypeptide"
EVQLVESGGGLVKPGGSLRLSCAASGFTFSSYSMNWVRQAPGKGLEWVSSISSSSSYIYYADSVKGRFTISRDNAKNSLYLQMNSLRAEDTAVYYCAKTIAAVYAFDIWGQGTTVTVSS

SEQ ID NO: 474 - protein, 117 aa, Artificial Sequence
  source: /note="Description of Artificial Sequence: Synthetic polypeptide"
EVQLVESGGGLVKPGGSLRLSCAASGFTFSDYYMSWIRQAPGKGLEWVSYISSSGSTIYYADSVKGRFTISRDNAKNSLYLQMNSLRAEDTAVYYCARDLRGAFDIWGQGTMVTVSS

SEQ ID NO: 475 - protein, 120 aa, Artificial Sequence
  source: /note="Description of Artificial Sequence: Synthetic polypeptide"
QVQLVQSGAEVKKPGASVKVSCKPSGYTVTSHYIHWVRRAPGQGLEWMGMINPSGGVTAYSQTLQGRVTMTSDTSSSTVYMELSSLRSEDTAMYYCAREGSGSGWYFDFWGRGTLVTVSS

SEQ ID NO: 476 - protein, 123 aa, Artificial Sequence
  source: /note="Description of Artificial Sequence: Synthetic polypeptide"
QVQLQESGPGLVKPSQTLSLTCTVSGGSISSGGYYWSWIRQHPGKGLEWIGYIYYSGSTYYNPSLKSRVTISVDTSKNQFSLKLSSVTAADTAVYYCARAGIAARLRGAFDIWGQGTMVTVSS

SEQ ID NO: 477 - protein, 129 aa, Artificial Sequence
  source: /note="Description of Artificial Sequence: Synthetic polypeptide"
QVQLVQSGAEVKKPGSSVKVSCKASGGTFSSYAISWVRQAPGQGLEWMGGIIPIFGTANYAQKFQGRVTITADESTSTAYMELSSLRSEDTAVYYCARRGGYQLLRWDVGLLRSAFDIWGQGTMVTVSS

SEQ ID NO: 478 - protein, 125 aa, Artificial Sequence
  source: /note="Description of Artificial Sequence: Synthetic polypeptide"
EVQLQQSGPGLVKPSQTLSLTCAISGDSVSSNSAAWNWIRQSPSRGLEWLGRTYYRSKWYSFYAISLKSRIIINPDTSKNQFSLQLKSVTPEDTAVYYCARSSPEGLFLYWFDPWGQGTLVTVSS

SEQ ID NO: 479 - protein, 118 aa, Artificial Sequence
  source: /note="Description of Artificial Sequence: Synthetic polypeptide"
EVQLVESGGGLVQPGGSLRLSCAASGFTFSSYAMSWVRQAPGKGLEWVSAISGSGGSTYYADSVKGRFTISRDNSKNTLYLQMNSLRAEDTAVYYCAKVEGSGSLDYWGQGTLVTVSS

SEQ ID NO: 480 - protein, 118 aa, Artificial Sequence
  source: /note="Description of Artificial Sequence: Synthetic polypeptide"
EVQLVETGGGLVQPGGSLRLSCAASGITFSRYPMSWVRQAPGKGLEWVSGISDSGVSTYYADSAKGRFTISRDNSKNTLFLQMSSLRDEDTAVYYCVTRAGSEASDIWGQGTMVTVSS

SEQ ID NO: 481 - protein, 124 aa, Artificial Sequence
  source: /note="Description of Artificial Sequence: Synthetic polypeptide"
QVQLVESGGGLVQPGGSLRLSCAASGFTFSSYAMSWVRQAPGKGLEWVSAISGSGGSTYYADSVKGRFTISRDNAKNSLYLQMNSLRAEDTAIYYCARATYKRELRYYYGMDVWGQGTMVTVSS

SEQ ID NO: 482 - protein, 124 aa, Artificial Sequence
  source: /note="Description of Artificial Sequence: Synthetic polypeptide"
EVQLVETGGGLVQPGGSLRLSCAASGFTFSSYAMSWVRQAPGKGLEWVSAISGSGGSTYYADSVKGRFTISRDNSKNTLYLQMNTLKAEDTAVYYCARATYKRELRYYYGMDVWGQGTTVTVSS

SEQ ID NO: 483 - protein, 117 aa, Artificial Sequence
  source: /note="Description of Artificial Sequence: Synthetic polypeptide"
EVQLVETGGGLVQPGRSLRLSCAASGFTFDDYAMHWVRQAPGKGLEWVSGISWNSGSIGYADSVKGRFTISRDNAKNSLYLQMNSLRDEDTAVYYCARVGKAVPDVWGQGTTVTVSS

SEQ ID NO: 484 - protein, 122 aa, Artificial Sequence
  source: /note="Description of Artificial Sequence: Synthetic polypeptide"
EVQLVESGGGLVQPGRSLRLSCTASGFTFDDYAMHWVRQRPGKGLEWVASINWKGNSLAYGDSVKGRFAISRDNAKNTVFLQMNSLRTEDTAVYYCASHQGVAYYNYAMDVWGRGTLVTVSS

SEQ ID NO: 485 - protein, 117 aa, Artificial Sequence
  source: /note="Description of Artificial Sequence: Synthetic polypeptide"
EVQLVESGGGLVQPGGSLRLSCAASGFTFSSYAMSWVRQAPGKGLEWVSAISGSGGSTYYADSVKGRFTISRDNSKNTLYLQMNSLRAEDTAVYYCAKVVRDGMDVWGQGTTVTVSS

SEQ ID NO: 486 - protein, 118 aa, Artificial Sequence
  source: /note="Description of Artificial Sequence: Synthetic polypeptide"
EVQLLESGGGLVQPGGSLRLSCAASGFTFSSYAMSWVRQAPGKGLEWVSAISGSGGSTYYADSVKGRFTISRDNSKNTLYLQMNSLRAEDTAVYYCAKIPQTGTFDYWGQGTLVTVSS

SEQ ID NO: 487 - protein, 124 aa, Artificial Sequence
  source: /note="Description of Artificial Sequence: Synthetic polypeptide"
EVQLVETGGGLVQPGGSLRLSCAASGFTFSSYAMSWVRQAPGKGLEWVSAISGSGGSTYYADSVKGRFTMSRENDKNSVFLQMNSLRVEDTGVYYCARANYKRELRYYYGMDVWGQGTMVTVSS

SEQ ID NO: 488 - protein, 120 aa, Artificial Sequence
  source: /note="Description of Artificial Sequence: Synthetic polypeptide"
EVQLLETGGGLVQPGGSLRLSCAASGFSFSSYAMSWVRQAPGKGLEWVSAISGSGGSTYYADSVKGRFTISRDNSKNTLYLQMNSLRAEDTAVYYCAKALVGATGAFDIWGQGTLVTVSS

SEQ ID NO: 489 - protein, 117 aa, Artificial Sequence
  source: /note="Description of Artificial Sequence: Synthetic polypeptide"
EVQLLESGGGLVQPGGSLRLSCAASGFTFSSYAMSWVRQAPGKGLEWVSAISGSGGSTYYADSVKGRFTISRDNSKNTLYLQMNSLRAEDTAVYYCVLWFGEGFDPWGQGTLVTVSS

SEQ ID NO: 490 - protein, 126 aa, Artificial Sequence
  source: /note="Description of Artificial Sequence: Synthetic polypeptide"
QVQLVESGGGLVQPGGSLRLSCAASGFTFSSYAMSWVRQAPGKGLEWVSAISGSGGSTYYADSVKGRFTISRDNSKNTLYLQMNSLRAEDTAVYYCAKVGYDSSGYYRDYYGMDVWGQGTTVTVSS

SEQ ID NO: 491 - protein, 122 aa, Artificial Sequence
  source: /note="Description of Artificial Sequence: Synthetic polypeptide"
EVQLVESGGGLVQPGGSLRLSCAASGFTFSSYAMSWVRQAPGKGLEWVSAISGSGGSTYYADSVKGRFTISRDNSKNTLYLQMNSLRAEDTAVYYCAKMGWSSGYLGAFDIWGQGTTVTVSS

SEQ ID NO: 492 - protein, 107 aa, Artificial Sequence
  source: /note="Description of Artificial Sequence: Synthetic polypeptide"
ETTLTQSPAFMSATPGDKVIISCKASQDIDDAMNWYQQKPGEAPLFIIQSATSPVPGIPPRFSGSGFGTDFSLTINNIESEDAAYYFCLQHDNFPLTFGQGTKLEIK

SEQ ID NO: 493 - protein, 107 aa, Artificial Sequence
  source: /note="Description of Artificial Sequence: Synthetic polypeptide"
DIQMTQSPSSLSASVGDRVTITCRASQDIYNNLAWFQLKPGSAPRSLMYAANKSQSGVPSRFSGSASGTDFTLTISSLQPEDFATYYCQHYYRFPYSFGQGTKLEIK

SEQ ID NO: 494 - protein, 112 aa, Artificial Sequence
  source: /note="Description of Artificial Sequence: Synthetic polypeptide"
EIVLTQSPLSLPVTPEEPASISCRSSQSLLHSNGYNYLDWYLQKPGQSPQLLIYLGSNRASGVPDRFSGSGSGTDFTLKISRVEAEDVGVYYCMQALQTPYTFGQGTKLEIK

SEQ ID NO: 495 - protein, 108 aa, Artificial Sequence
  source: /note="Description of Artificial Sequence: Synthetic polypeptide"
SYVLTQSPSVSAAPGYTATISCGGNNIGTKSVHWYQQKPGQAPLLVIRDDSVRPSKIPGRFSGSNSGNMATLTISGVQAGDEADFYCQVWDSDSEHVVFGGGTKLTVL

SEQ ID NO: 496 - protein, 106 aa, Artificial Sequence
  source: /note="Description of Artificial Sequence: Synthetic polypeptide"
SYVLTQPPSVSVSPGQTASITCSGDGLSKKYVSWYQQKAGQSPVVLISRDKERPSGIPDRFSGSNSADTATLTISGTQAMDEADYYCQAWDDTTVVFGGGTKLTVL

SEQ ID NO: 497 - protein, 107 aa, Artificial Sequence
  source: /note="Description of Artificial Sequence: Synthetic polypeptide"
DIVMTQSPSSVSASVGDRVIITCRASQGIRNWLAWYQQKPGKAPNLLIYAASNLQSGVPSRFSGSGSGADFTLTISSLQPEDVATYYCQKYNSAPFTFGPGTKVDIK

SEQ ID NO: 498 - protein, 109 aa, Artificial Sequence
  source: /note="Description of Artificial Sequence: Synthetic polypeptide"
SYVLTQPPSVSVAPGQTARITCGGNNIGSKSVHWYQQKPGQAPVLVLYGKNNRPSGVPDRFSGSRSGTTASLTITGAQAEDEADYYCSSRDSSGDHLRVFGTGTKVTVL

SEQ ID NO: 499 - protein, 108 aa, Artificial Sequence
  source: /note="Description of Artificial Sequence: Synthetic polypeptide"
SSELTQDPAVSVALGQTIRITCQGDSLGNYYATWYQQKPGQAPVLVIYGTNNRPSGIPDRFSASSSGNTASLTITGAQAEDEADYYCNSRDSSGHHLLFGTGTKVTVL

SEQ ID NO: 500 - protein, 113 aa, Artificial Sequence
  source: /note="Description of Artificial Sequence: Synthetic polypeptide"
EIVMTQSPGTLSLSPGERATLSCRASQSVSSAYLAWYQQKPGQPPRLLISGASTRATGIPDRFGGSGSGTDFTLTISRLEPEDFAVYYCQHYGSSFNGSSLFTFGQGTRLEIK

SEQ ID NO: 501 - protein, 108 aa, Artificial Sequence
  source: /note="Description of Artificial Sequence: Synthetic polypeptide"
EIVLTQSPATLSLSPGERATLSCRASQSVSNSLAWYQQKPGQAPRLLIYDASSRATGIPDRFSGSGSGTDFTLTISRLEPEDFAIYYCQQFGTSSGLTFGGGTKLEIK

SEQ ID NO: 502 - protein, 109 aa, Artificial Sequence
  source: /note="Description of Artificial Sequence: Synthetic polypeptide"
EIVMTQSPGTVSLSPGERATLSCRASQSVSSSFLAWYQQKPGQAPRLLIYGASSRATGIPDRFSGSGSGTDFTLTISRLEPEDSAVYYCQQYHSSPSWTFGQGTRLEIK

SEQ ID NO: 503 - protein, 109 aa, Artificial Sequence
  source: /note="Description of Artificial Sequence: Synthetic polypeptide"
EIVLTQSPSTLSLSPGESATLSCRASQSVSTTFLAWYQQKPGQAPRLLIYGSSNRATGIPDRFSGSGSGTDFTLTIRRLEPEDFAVYYCQQYHSSPSWTFGQGTKVEIK

SEQ ID NO: 504 - protein, 107 aa, Artificial Sequence
  source: /note="Description of Artificial Sequence: Synthetic polypeptide"
DIVMTQTPSSLSASVGDRVTITCRASQSISSYLNWYQQKPGKAPKLLIYAASSLQSGVPSRFSGSGSGTDFTLTISSLQPEDFATYYCQQSYSTPYSFGQGTRLEIK

SEQ ID NO: 505 - protein, 109 aa, Artificial Sequence
  source: /note="Description of Artificial Sequence: Synthetic polypeptide"
EIVLTQSPGTLSLSPGERATLSCRATQSIGSSFLAWYQQRPGQAPRLLIYGASQRATGIPDRFSGRGSGTDFTLTISRVEPEDSAVYYCQHYESSPSWTFGQGTKVEIK

SEQ ID NO: 506 - protein, 109 aa, Artificial Sequence
  source: /note="Description of Artificial Sequence: Synthetic polypeptide"
EIVLTQSPATLSLSPGERATLSCRASQSVSSSYLAWYQQKPGQAPRLLIYGASSRATGIPDRFSGNGSGTDFTLTISRLEPEDFAVYYCQQYGSPPRFTFGPGTKVDIK

SEQ ID NO: 507 - protein, 109 aa, Artificial Sequence
  source: /note="Description of Artificial Sequence: Synthetic polypeptide"
EIVLTQSPGTLSLSPGERATLSCRASQSVSSSYLAWYQQRPGQAPRLLIYGASSRATGIPDRFSGSGSGTDFTLTISRLEPEDFAVYYCQHYGSSPSWTFGQGTRLEIK

SEQ ID NO: 508 - protein, 109 aa, Artificial Sequence
  source: /note="Description of Artificial Sequence: Synthetic polypeptide"
EIVMTQSPGTLSLSPGESATLSCRASQRVASNYLAWYQHKPGQAPSLLISGASSRATGVPDRFSGSGSGTDFTLAISRLEPEDSAVYYCQHYDSSPSWTFGQGTKVEIK

SEQ ID NO: 509 - protein, 109 aa, Artificial Sequence
  source: /note="Description of Artificial Sequence: Synthetic polypeptide"
EIVLTQSPGTLSLSPGERATLSCRASQSLSSNFLAWYQQKPGQAPGLLIYGASNWATGTPDRFSGSGSGTDFTLTITRLEPEDFAVYYCQYYGTSPMYTFGQGTKVEIK

SEQ ID NO: 510 - protein, 112 aa, Artificial Sequence
  source: /note="Description of Artificial Sequence: Synthetic polypeptide"
DIVLTQSPLSLPVTPGEPASISCRSSQSLLHSNGYNYLDWYLQKPGQSPQLLIYLGSNRASGVPDRFSGSGSGTDFTLKISRVEAEDVGVYYCMQALQTPLTFGGGTKVDIK

SEQ ID NO: 511 - protein, 110 aa, Artificial Sequence
  source: /note="Description of Artificial Sequence: Synthetic polypeptide"
EIVLTQSPGTLSLSPGERATLSCRASQSVSSSYLAWYQQKPGQAPRLLIYGTSSRATGISDRFSGSGSGTDFTLTISRLEPEDFAVYYCQHYGNSPPKFTFGPGTKLEIK

SEQ ID NO: 512 - protein, 109 aa, Artificial Sequence
  source: /note="Description of Artificial Sequence: Synthetic polypeptide"
EIVLTQSPGTLSLSPGERATLSCRASQSVASSFLAWYQQKPGQAPRLLIYGASGRATGIPDRFSGSGSGTDFTLTISRLEPEDFAVYYCQHYGGSPRLTFGGGTKVDIK

SEQ ID NO: 513-554 - skipped (42 entries)

SEQ ID NO: 555 - protein, 122 aa, Artificial Sequence
  source: /note="Description of Artificial Sequence: Synthetic polypeptide"
QIQLVQSGPDLKKPGETVKLSCKASGYTFTNFGMNWVKQAPGKGFKWMAWINTYTGESYFADDFKGRFAFSVETSATTAYLQINNLKTEDTATYFCARGEIYYGYDGGFAYWGQGTLVTVSA

SEQ ID NO: 556 - protein, 117 aa, Artificial Sequence
  source: /note="Description of Artificial Sequence: Synthetic polypeptide"
QIQLVQSGPELKKPGETVKISCKASGYTFTDYSINWVKRAPGKGLKWMGWINTETREPAYAYDFRGRFAFSLETSASTAYLQINNLKYEDTATYFCALDYSYAMDYWGQGTSVTVSS

SEQ ID NO: 557 - protein, 117 aa, Artificial Sequence
  source: /note="Description of Artificial Sequence: Synthetic polypeptide"
QIQLVQSGPELKKPGETVKISCKASGYTFRHYSMNWVKQAPGKGLKWMGRINTESGVPIYADDFKGRFAFSVETSASTAYLVINNLKDEDTASYFCSNDYLYSLDFWGQGTALTVSS

SEQ ID NO: 558 - protein, 117 aa, Artificial Sequence
  source: /note="Description of Artificial Sequence: Synthetic polypeptide"
QIQLVQSGPELKKPGETVKISCKASGYTFTHYSMNWVKQAPGKGLKWMGRINTETGEPLYADDFKGRFAFSLETSASTAYLVINNLKNEDTATFFCSNDYLYSCDYWGQGTTLTVSS

SEQ ID NO: 559 - protein, 107 aa, Artificial Sequence
  source: /note="Description of Artificial Sequence: Synthetic polypeptide"
DVVMTQSHRFMSTSVGDRVSITCRASQDVNTAVSWYQQKPGQSPKLLIFSASYRYTGVPDRFTGSGSGADFTLTISSVQAEDLAVYYCQQHYSTPWTFGGGTKLDIK

SEQ ID NO: 560 - protein, 111 aa, Artificial Sequence
  source: /note="Description of Artificial Sequence: Synthetic polypeptide"
DIVLTQSPASLAMSLGKRATISCRASESVSVIGAHLIHWYQQKPGQPPKLLIYLASNLETGVPARFSGSGSGTDFTLTIDPVEEDDVAIYSCLQSRIFPRTFGGGTKLEIK

SEQ ID NO: 561 - protein, 111 aa, Artificial Sequence
  source: /note="Description of Artificial Sequence: Synthetic polypeptide"
DIVLTQSPPSLAMSLGKRATISCRASESVTILGSHLIYWYQQKPGQPPTLLIQLASNVQTGVPARFSGSGSRTDFTLTIDPVEEDDVAVYYCLQSRTIPRTFGGGTKLEIK

SEQ ID NO: 562 - protein, 111 aa, Artificial Sequence; identical to SEQ ID NO: 561
  source: /note="Description of Artificial Sequence: Synthetic polypeptide"

SEQ ID NO: 563 - protein, 244 aa, Artificial Sequence
  source: /note="Description of Artificial Sequence: Synthetic polypeptide"
QIQLVQSGPDLKKPGETVKLSCKASGYTFTNFGMNWVKQAPGKGFKWMAWINTYTGESYFADDFKGRFAFSVETSATTAYLQINNLKTEDTATYFCARGEIYYGYDGGFAYWGQGTLVTVSAGGGGSGGGGSGGGGSDVVMTQSHRFMSTSVGDRVSITCRASQDVNTAVSWYQQKPGQSPKLLIFSASYRYTGVPDRFTGSGSGADFTLTISSVQAEDLAVYYCQQHYSTPWTFGGGTKLDIK

SEQ ID NO: 564 - protein, 249 aa, Artificial Sequence
  source: /note="Description of Artificial Sequence: Synthetic polypeptide"
QIQLVQSGPELKKPGETVKISCKASGYTFTDYSINWVKRAPGKGLKWMGWINTETREPAYAYDFRGRFAFSLETSASTAYLQINNLKYEDTATYFCALDYSYAMDYWGQGTSVTVSSGGGGSGGGGSGGGGSQIQLVQSGPELKKPGETVKISCKASGYTFTDYSINWVKRAPGKGLKWMGWINTETREPAYAYDFRGRFAFSLETSASTAYLQINNLKYEDTATYFCALDYSYAMDYWGQGTSVTVSS

SEQ ID NO: 565 - protein, 243 aa, Artificial Sequence
  source: /note="Description of Artificial Sequence: Synthetic polypeptide"
QIQLVQSGPELKKPGETVKISCKASGYTFRHYSMNWVKQAPGKGLKWMGRINTESGVPIYADDFKGRFAFSVETSASTAYLVINNLKDEDTASYFCSNDYLYSLDFWGQGTALTVSSGGGGSGGGGSGGGGSDIVLTQSPPSLAMSLGKRATISCRASESVTILGSHLIYWYQQKPGQPPTLLIQLASNVQTGVPARFSGSGSRTDFTLTIDPVEEDDVAVYYCLQSRTIPRTFGGGTKLEIK

SEQ ID NO: 566 - protein, 243 aa, Artificial Sequence
  source: /note="Description of Artificial Sequence: Synthetic polypeptide"
QIQLVQSGPELKKPGETVKISCKASGYTFTHYSMNWVKQAPGKGLKWMGRINTETGEPLYADDFKGRFAFSLETSASTAYLVINNLKNEDTATFFCSNDYLYSCDYWGQGTTLTVSSGGGGSGGGGSGGGGSDIVLTQSPPSLAMSLGKRATISCRASESVTILGSHLIYWYQQKPGQPPTLLIQLASNVQTGVPARFSGSGSRTDFTLTIDPVEEDDVAVYYCLQSRTIPRTFGGGTKLEIK

SEQ ID NO: 567-683 - skipped (117 entries)

SEQ ID NO: 684 - protein, 5 aa, Artificial Sequence
  source: /note="Description of Artificial Sequence: Synthetic peptide"
NYAMS

SEQ ID NO: 685 - protein, 5 aa, Artificial Sequence
  source: /note="Description of Artificial Sequence: Synthetic peptide"
DYAMH

SEQ ID NO: 686 - protein, 5 aa, Artificial Sequence
  source: /note="Description of Artificial Sequence: Synthetic peptide"
NHGMS

SEQ ID NO: 687 - protein, 5 aa, Artificial Sequence
  source: /note="Description of Artificial Sequence: Synthetic peptide"
NFGIN

SEQ ID NO: 688 - protein, 5 aa, Artificial Sequence
  source: /note="Description of Artificial Sequence: Synthetic peptide"
SDAMT

SEQ ID NO: 689 - protein, 5 aa, Artificial Sequence
  source: /note="Description of Artificial Sequence: Synthetic peptide"
NYGIT

SEQ ID NO: 690 - protein, 5 aa, Artificial Sequence
  source: /note="Description of Artificial Sequence: Synthetic peptide"
NHGMS

SEQ ID NO: 691 - protein, 5 aa, Artificial Sequence
  source: /note="Description of Artificial Sequence: Synthetic peptide"
NHGMS

SEQ ID NO: 692 - protein, 5 aa, Artificial Sequence
  source: /note="Description of Artificial Sequence: Synthetic peptide"
NHGMS

SEQ ID NO: 693 - protein, 5 aa, Artificial Sequence
  source: /note="Description of Artificial Sequence: Synthetic peptide"
DYYMS

SEQ ID NO: 694 - protein, 5 aa, Artificial Sequence
  source: /note="Description of Artificial Sequence: Synthetic peptide"
NHGMS

SEQ ID NO: 695 - protein, 5 aa, Artificial Sequence
  source: /note="Description of Artificial Sequence: Synthetic peptide"
DYYMS

SEQ ID NO: 696 - protein, 5 aa, Artificial Sequence
  source: /note="Description of Artificial Sequence: Synthetic peptide"
NHGMS

SEQ ID NO: 697 - protein, 5 aa, Artificial Sequence
  source: /note="Description of Artificial Sequence: Synthetic peptide"
NHGMS

SEQ ID NO: 698 - protein, 5 aa, Artificial Sequence
  source: /note="Description of Artificial Sequence: Synthetic peptide"
NHGMS

SEQ ID NO: 699 - protein, 7 aa, Artificial Sequence
  source: /note="Description of Artificial Sequence: Synthetic peptide"
SSYYYWG

SEQ ID NO: 700 - protein, 7 aa, Artificial Sequence
  source: /note="Description of Artificial Sequence: Synthetic peptide"
TSGMCVS

SEQ ID NO: 701 - protein, 5 aa, Artificial Sequence
  source: /note="Description of Artificial Sequence: Synthetic peptide"
SYSMN

SEQ ID NO: 702 - protein, 5 aa, Artificial Sequence
  source: /note="Description of Artificial Sequence: Synthetic peptide"
DYYMS

SEQ ID NO: 703 - protein, 5 aa, Artificial Sequence
  source: /note="Description of Artificial Sequence: Synthetic peptide"
SHYIH

SEQ ID NO: 704 - protein, 7 aa, Artificial Sequence
  source: /note="Description of Artificial Sequence: Synthetic peptide"
SGGYYWS

SEQ ID NO: 705 - protein, 5 aa, Artificial Sequence
  source: /note="Description of Artificial Sequence: Synthetic peptide"
SYAIS

SEQ ID NO: 706 - protein, 7 aa, Artificial Sequence
  source: /note="Description of Artificial Sequence: Synthetic peptide"
SNSAAWN

SEQ ID NO: 707 - protein, 5 aa, Artificial Sequence
  source: /note="Description of Artificial Sequence: Synthetic peptide"
SYAMS

SEQ ID NO: 708 - protein, 5 aa, Artificial Sequence
  source: /note="Description of Artificial Sequence: Synthetic peptide"
RYPMS

SEQ ID NO: 709 - protein, 5 aa, Artificial Sequence
  source: /note="Description of Artificial Sequence: Synthetic peptide"
SYAMS

SEQ ID NO: 710 - protein, 5 aa, Artificial Sequence
  source: /note="Description of Artificial Sequence: Synthetic peptide"
SYAMS

SEQ ID NO: 711 - protein, 5 aa, Artificial Sequence
  source: /note="Description of Artificial Sequence: Synthetic peptide"
DYAMH

SEQ ID NO: 712 - protein, 5 aa, Artificial Sequence
  source: /note="Description of Artificial Sequence: Synthetic peptide"
DYAMH

SEQ ID NO: 713 - protein, 5 aa, Artificial Sequence
  source: /note="Description of Artificial Sequence: Synthetic peptide"
SYAMS

SEQ ID NO: 714 - protein, 5 aa, Artificial Sequence
  source: /note="Description of Artificial Sequence: Synthetic peptide"
SYAMS

SEQ ID NO: 715 - protein, 5 aa, Artificial Sequence
  source: /note="Description of Artificial Sequence: Synthetic peptide"
SYAMS

SEQ ID NO: 716 - protein, 5 aa, Artificial Sequence
  source: /note="Description of Artificial Sequence: Synthetic peptide"
SYAMS

SEQ ID NO: 717 - protein, 5 aa, Artificial Sequence
  source: /note="Description of Artificial Sequence: Synthetic peptide"
SYAMS

SEQ ID NO: 718 - protein, 5 aa, Artificial Sequence
  source: /note="Description of Artificial Sequence: Synthetic peptide"
SYAMS

SEQ ID NO: 719 - protein, 5 aa, Artificial Sequence
  source: /note="Description of Artificial Sequence: Synthetic peptide"
SYAMS

SEQ ID NO: 720 - protein, 5 aa, Artificial Sequence
  source: /note="Description of Artificial Sequence: Synthetic peptide"
NFGMN

SEQ ID NO: 721 - protein, 5 aa, Artificial Sequence
  source: /note="Description of Artificial Sequence: Synthetic peptide"
DYSIN

SEQ ID NO: 722 - protein, 5 aa, Artificial Sequence
  source: /note="Description of Artificial Sequence: Synthetic peptide"
HYSMN

SEQ ID NO: 723 - protein, 5 aa, Artificial Sequence
  source: /note="Description of Artificial Sequence: Synthetic peptide"
HYSMN

SEQ ID NO: 724 - protein, 17 aa, Artificial Sequence
  source: /note="Description of Artificial Sequence: Synthetic peptide"
GISRSGENTYYADSVKG

SEQ ID NO: 725 - protein, 17 aa, Artificial Sequence
  source: /note="Description of Artificial Sequence: Synthetic peptide"
GISWNSGSIGYADSVKG

SEQ ID NO: 726 - protein, 16 aa, Artificial Sequence
  source: /note="Description of Artificial Sequence: Synthetic peptide"
GIVYSGSTYYAASVKG

SEQ ID NO: 727 - protein, 17 aa, Artificial Sequence
  source: /note="Description of Artificial Sequence: Synthetic peptide"
WINPKNNNTNYAQKFQG

SEQ ID NO: 728 - protein, 17 aa, Artificial Sequence
  source: /note="Description of Artificial Sequence: Synthetic peptide"
VISGSGGTTYYADSVKG

SEQ ID NO: 729 - protein, 17 aa, Artificial Sequence
  source: /note="Description of Artificial Sequence: Synthetic peptide"
WISAYNGNTNYAQKFQG

SEQ ID NO: 730 - protein, 16 aa, Artificial Sequence
  source: /note="Description of Artificial Sequence: Synthetic peptide"
GIVYSGSTYYAASVKG

SEQ ID NO: 731 - protein, 16 aa, Artificial Sequence
  source: /note="Description of Artificial Sequence: Synthetic peptide"
GIVYSGSTYYAASVKG

SEQ ID NO: 732 - protein, 16 aa, Artificial Sequence
  source: /note="Description of Artificial Sequence: Synthetic peptide"
GIVYSGSTYYAASVKG

SEQ ID NO: 733 - protein, 17 aa, Artificial Sequence
  source: /note="Description of Artificial Sequence: Synthetic peptide"
YISSSGSTIYYADSVKG

SEQ ID NO: 734 - protein, 16 aa, Artificial Sequence
  source: /note="Description of Artificial Sequence: Synthetic peptide"
GIVYSGSTYYAASVKG

SEQ ID NO: 735 - protein, 17 aa, Artificial Sequence
  source: /note="Description of Artificial Sequence: Synthetic peptide"
YISSSGNTIYYADSVKG

SEQ ID NO: 736 - protein, 16 aa, Artificial Sequence
  source: /note="Description of Artificial Sequence: Synthetic peptide"
GIVYSGSTYYAASVKG

SEQ ID NO: 737 - protein, 16 aa, Artificial Sequence
  source: /note="Description of Artificial Sequence: Synthetic peptide"
GIVYSGSTYYAASVKG

SEQ ID NO: 738 - protein, 16 aa, Artificial Sequence
  source: /note="Description of Artificial Sequence: Synthetic peptide"
GIVYSGSTYYAASVKG

SEQ ID NO: 739 - protein, 16 aa, Artificial Sequence
  source: /note="Description of Artificial Sequence: Synthetic peptide"
SIYYSGSAYYNPSLKS

SEQ ID NO: 740 - protein, 16 aa, Artificial Sequence
  source: /note="Description of Artificial Sequence: Synthetic peptide"
RIDWDEDKFYSTSLKT

SEQ ID NO: 741 - protein, 17 aa, Artificial Sequence
  source: /note="Description of Artificial Sequence: Synthetic peptide"
SISSSSSYIYYADSVKG

SEQ ID NO: 742 - protein, 17 aa, Artificial Sequence
  source: /note="Description of Artificial Sequence: Synthetic peptide"
YISSSGSTIYYADSVKG

SEQ ID NO: 743 - protein, 17 aa, Artificial Sequence
  source: /note="Description of Artificial Sequence: Synthetic peptide"
MINPSGGVTAYSQTLQG

SEQ ID NO: 744 - protein, 16 aa, Artificial Sequence
  source: /note="Description of Artificial Sequence: Synthetic peptide"
YIYYSGSTYYNPSLKS

SEQ ID NO: 745 - protein, 17 aa, Artificial Sequence
  source: /note="Description of Artificial Sequence: Synthetic peptide"
GIIPIFGTANYAQKFQG

SEQ ID NO: 746 - protein, 18 aa, Artificial Sequence
  source: /note="Description of Artificial Sequence: Synthetic peptide"
RTYYRSKWYSFYAISLKS

SEQ ID NO: 747 - protein, 17 aa, Artificial Sequence
  source: /note="Description of Artificial Sequence: Synthetic peptide"
AISGSGGSTYYADSVKG

SEQ ID NO: 748 - protein, 17 aa, Artificial Sequence
  source: /note="Description of Artificial Sequence: Synthetic peptide"
GISDSGVSTYYADSAKG

SEQ ID NO: 749 - protein, 17 aa, Artificial Sequence
  source: /note="Description of Artificial Sequence: Synthetic peptide"
AISGSGGSTYYADSVKG

SEQ ID NO: 750 - protein, 17 aa, Artificial Sequence
  source: /note="Description of Artificial Sequence: Synthetic peptide"
AISGSGGSTYYADSVKG

SEQ ID NO: 751 - protein, 17 aa, Artificial Sequence
  source: /note="Description of Artificial Sequence: Synthetic peptide"
GISWNSGSIGYADSVKG

SEQ ID NO: 752 - protein, 17 aa, Artificial Sequence
  source: /note="Description of Artificial Sequence: Synthetic peptide"
SINWKGNSLAYGDSVKG

SEQ ID NO: 753 - protein, 17 aa, Artificial Sequence
  source: /note="Description of Artificial Sequence: Synthetic peptide"
AISGSGGSTYYADSVKG

SEQ ID NO: 754 - protein, 17 aa, Artificial Sequence
  source: /note="Description of Artificial Sequence: Synthetic peptide"
AISGSGGSTYYADSVKG

SEQ ID NO: 755 - protein, 17 aa, Artificial Sequence
  source: /note="Description of Artificial Sequence: Synthetic peptide"
AISGSGGSTYYADSVKG

SEQ ID NO: 756 - protein, 17 aa, Artificial Sequence
  source: /note="Description of Artificial Sequence: Synthetic peptide"
AISGSGGSTYYADSVKG

SEQ ID NO: 757 - protein, 17 aa, Artificial Sequence
  source: /note="Description of Artificial Sequence: Synthetic peptide"
AISGSGGSTYYADSVKG

SEQ ID NO: 758 - protein, 17 aa, Artificial Sequence
  source: /note="Description of Artificial Sequence: Synthetic peptide"
AISGSGGSTYYADSVKG

SEQ ID NO: 759 - protein, 17 aa, Artificial Sequence
  source: /note="Description of Artificial Sequence: Synthetic peptide"
AISGSGGSTYYADSVKG

SEQ ID NO: 760 - protein, 17 aa, Artificial Sequence
  source: /note="Description of Artificial Sequence: Synthetic peptide"
WINTYTGESYFADDFKG

SEQ ID NO: 761 - protein, 17 aa, Artificial Sequence
  source: /note="Description of Artificial Sequence: Synthetic peptide"
WINTETREPAYAYDFRG

SEQ ID NO: 762 - protein, 17 aa, Artificial Sequence
  source: /note="Description of Artificial Sequence: Synthetic peptide"
RINTESGVPIYADDFKG

SEQ ID NO: 763 - protein, 17 aa, Artificial Sequence
  source: /note="Description of Artificial Sequence: Synthetic peptide"
RINTETGEPLYADDFKG

SEQ ID NO: 764 - protein, 11 aa, Artificial Sequence
  source: /note="Description of Artificial Sequence: Synthetic peptide"
SPAHYYGGMDV

SEQ ID NO: 765 - protein, 6 aa, Artificial Sequence
  source: /note="Description of Artificial Sequence: Synthetic peptide"
HSFLAY

SEQ ID NO: 766 - protein, 7 aa, Artificial Sequence
  source: /note="Description of Artificial Sequence: Synthetic peptide"
HGGESDV

SEQ ID NO: 767 - protein, 11 aa, Artificial Sequence
  source: /note="Description of Artificial Sequence: Synthetic peptide"
GPYYYQSYMDV

SEQ ID NO: 768 - protein, 14 aa, Artificial Sequence
  source: /note="Description of Artificial Sequence: Synthetic peptide"
LDSSGYYYARGPRY

SEQ ID NO: 769 - protein, 9 aa, Artificial Sequence
  source: /note="Description of Artificial Sequence: Synthetic peptide"
GPYYYYMDV

SEQ ID NO: 770 - protein, 7 aa, Artificial Sequence
  source: /note="Description of Artificial Sequence: Synthetic peptide"
HGGESDV

SEQ ID NO: 771 - protein, 7 aa, Artificial Sequence
  source: /note="Description of Artificial Sequence: Synthetic peptide"
HGGESDV

SEQ ID NO: 772 - protein, 7 aa, Artificial Sequence
  source: /note="Description of Artificial Sequence: Synthetic peptide"
HGGESDV

SEQ ID NO: 773 - protein, 8 aa, Artificial Sequence
  source: /note="Description of Artificial Sequence: Synthetic peptide"
ESGDGMDV

SEQ ID NO: 774 - protein, 7 aa, Artificial Sequence
  source: /note="Description of Artificial Sequence: Synthetic peptide"
HGGESDV

SEQ ID NO: 775 - protein, 8 aa, Artificial Sequence
  source: /note="Description of Artificial Sequence: Synthetic peptide"
STMVREDY

SEQ ID NO: 776 - protein, 7 aa, Artificial Sequence
  source: /note="Description of Artificial Sequence: Synthetic peptide"
HGGESDV

SEQ ID NO: 777 - protein, 7 aa, Artificial Sequence
  source: /note="Description of Artificial Sequence: Synthetic peptide"
HGGESDV

SEQ ID NO: 778 - protein, 7 aa, Artificial Sequence
  source: /note="Description of Artificial Sequence: Synthetic peptide"
HGGESDV

SEQ ID NO: 779 - protein, 11 aa, Artificial Sequence
  source: /note="Description of Artificial Sequence: Synthetic peptide"
HWQEWPDAFDI

SEQ ID NO: 780 - protein, 13 aa, Artificial Sequence
  source: /note="Description of Artificial Sequence: Synthetic peptide"
SGAGGTSATAFDI

SEQ ID NO: 781 - protein, 10 aa, Artificial Sequence
  source: /note="Description of Artificial Sequence: Synthetic peptide"
TIAAVYAFDI

SEQ ID NO: 782 - protein, 8 aa, Artificial Sequence
  source: /note="Description of Artificial Sequence: Synthetic peptide"
DLRGAFDI

SEQ ID NO: 783 - protein, 11 aa, Artificial Sequence
  source: /note="Description of Artificial Sequence: Synthetic peptide"
EGSGSGWYFDF

SEQ ID NO: 784 - protein, 13 aa, Artificial Sequence
  source: /note="Description of Artificial Sequence: Synthetic peptide"
AGIAARLRGAFDI

SEQ ID NO: 785 - protein, 20 aa, Artificial Sequence
  source: /note="Description of Artificial Sequence: Synthetic peptide"
RGGYQLLRWDVGLLRSAFDI

SEQ ID NO: 786 - protein, 13 aa, Artificial Sequence
  source: /note="Description of Artificial Sequence: Synthetic peptide"
SSPEGLFLYWFDP

SEQ ID NO: 787 - protein, 9 aa, Artificial Sequence
  source: /note="Description of Artificial Sequence: Synthetic peptide"
VEGSGSLDY

SEQ ID NO: 788 - protein, 9 aa, Artificial Sequence
  source: /note="Description of Artificial Sequence: Synthetic peptide"
RAGSEASDI

SEQ ID NO: 789 - protein, 15 aa, Artificial Sequence
  source: /note="Description of Artificial Sequence: Synthetic peptide"
ATYKRELRYYYGMDV

SEQ ID NO: 790 - protein, 15 aa, Artificial Sequence
  source: /note="Description of Artificial Sequence: Synthetic peptide"
ATYKRELRYYYGMDV

SEQ ID NO: 791 - protein, 8 aa, Artificial Sequence
  source: /note="Description of Artificial Sequence: Synthetic peptide"
VGKAVPDV

SEQ ID NO: 792 - protein, 13 aa, Artificial Sequence
  source: /note="Description of Artificial Sequence: Synthetic peptide"
HQGVAYYNYAMDV

SEQ ID NO: 793 - protein, 8 aa, Artificial Sequence
  source: /note="Description of Artificial Sequence: Synthetic peptide"
VVRDGMDV

SEQ ID NO: 794 - protein, 9 aa, Artificial Sequence
  source: /note="Description of Artificial Sequence: Synthetic peptide"
IPQTGTFDY

SEQ ID NO: 795 - protein, 15 aa, Artificial Sequence
  source: /note="Description of Artificial Sequence: Synthetic peptide"
ANYKRELRYYYGMDV

SEQ ID NO: 796 - protein, 11 aa, Artificial Sequence
  source: /note="Description of Artificial Sequence: Synthetic peptide"
ALVGATGAFDI

SEQ ID NO: 797 - protein, 8 aa, Artificial Sequence
  source: /note="Description of Artificial Sequence: Synthetic peptide"
WFGEGFDP

SEQ ID NO: 798 - protein, 17 aa, Artificial Sequence
  source: /note="Description of Artificial Sequence: Synthetic peptide"
VGYDSSGYYRDYYGMDV

SEQ ID NO: 799 - protein, 13 aa, Artificial Sequence
  source: /note="Description of Artificial Sequence: Synthetic peptide"
MGWSSGYLGAFDI

SEQ ID NO: 800 - protein, 13 aa, Artificial Sequence
  source: /note="Description of Artificial Sequence: Synthetic peptide"
GEIYYGYDGGFAY

SEQ ID NO: 801 - protein, 8 aa, Artificial Sequence
  source: /note="Description of Artificial Sequence: Synthetic peptide"
DYSYAMDY

SEQ ID NO: 802 - protein, 8 aa, Artificial Sequence
  source: /note="Description of Artificial Sequence: Synthetic peptide"
DYLYSLDF

SEQ ID NO: 803 - protein, 8 aa, Artificial Sequence
  source: /note="Description of Artificial Sequence: Synthetic peptide"
DYLYSCDY

SEQ ID NO: 804 - protein, 12 aa, Artificial Sequence
  source: /note="Description of Artificial Sequence: Synthetic peptide"
RASQSISSSFLA

SEQ ID NO: 805 - protein, 16 aa, Artificial Sequence
  source: /note="Description of Artificial Sequence: Synthetic peptide"
RSSQSLLHSNGYNYLD

SEQ ID NO: 806 - protein, 16 aa, Artificial Sequence
  source: /note="Description of Artificial Sequence: Synthetic peptide"
KSSQSLLRNDGKTPLY

SEQ ID NO: 807 - protein, 16 aa, Artificial Sequence
  source: /note="Description of Artificial Sequence: Synthetic peptide"
RSSQSLLHSNGYNYLN

SEQ ID NO: 808 - protein, 11 aa, Artificial Sequence
  source: /note="Description of Artificial Sequence: Synthetic peptide"
RASQSISSYLN

SEQ ID NO: 809 - protein, 16 aa, Artificial Sequence
  source: /note="Description of Artificial Sequence: Synthetic peptide"
RSSQSLLYSNGYNYVD

SEQ ID NO: 810 - protein, 11 aa, Artificial Sequence
  source: /note="Description of Artificial Sequence: Synthetic peptide"
RASQSVSSNLA

SEQ ID NO: 811 - protein, 11 aa, Artificial Sequence
  source: /note="Description of Artificial Sequence: Synthetic peptide"
RASQSVSSKLA

SEQ ID NO: 812 - protein, 12 aa, Artificial Sequence
  source: /note="Description of Artificial Sequence: Synthetic peptide"
RASQSVGSTNLA

SEQ ID NO: 813 - protein, 11 aa, Artificial Sequence
  source: /note="Description of Artificial Sequence: Synthetic peptide"
RASQSISSYLN

SEQ ID NO: 814 - protein, 11 aa, Artificial Sequence
  source: /note="Description of Artificial Sequence: Synthetic peptide"
RASQSISSYLN

SEQ ID NO: 815 - protein, 16 aa, Artificial Sequence
  source: /note="Description of Artificial Sequence: Synthetic peptide"
KSSESLVHNSGKTYLN

SEQ ID NO: 816 - protein, 11 aa, Artificial Sequence
  source: /note="Description of Artificial Sequence: Synthetic peptide"
QASEDINKFLN

SEQ ID NO: 817 - protein, 11 aa, Artificial Sequence
  source: /note="Description of Artificial Sequence: Synthetic peptide"
RASQSVGSNLA

SEQ ID NO: 818 - protein, 12 aa, Artificial Sequence
  source: /note="Description of Artificial Sequence: Synthetic peptide"
RASQSIGSSSLA

SEQ ID NO: 819 - protein, 11 aa, Artificial Sequence
  source: /note="Description of Artificial Sequence: Synthetic peptide"
KASQDIDDAMN

SEQ ID NO: 820 - protein, 11 aa, Artificial Sequence
  source: /note="Description of Artificial Sequence: Synthetic peptide"
RASQDIYNNLA

SEQ ID NO: 821 - protein, 16 aa, Artificial Sequence
  source: /note="Description of Artificial Sequence: Synthetic peptide"
RSSQSLLHSNGYNYLD

SEQ ID NO: 822 - protein, 11 aa, Artificial Sequence
  source: /note="Description of Artificial Sequence: Synthetic peptide"
GGNNIGTKSVH

SEQ ID NO: 823 - protein, 11 aa, Artificial Sequence
  source: /note="Description of Artificial Sequence: Synthetic peptide"
SGDGLSKKYVS

SEQ ID NO: 824 - protein, 11 aa, Artificial Sequence
  source: /note="Description of Artificial Sequence: Synthetic peptide"
RASQGIRNWLA

SEQ ID NO: 825 - protein, 11 aa, Artificial Sequence
  source: /note="Description of Artificial Sequence: Synthetic peptide"
GGNNIGSKSVH

SEQ ID NO: 826 - protein, 11 aa, Artificial Sequence
  source: /note="Description of Artificial Sequence: Synthetic peptide"
QGDSLGNYYAT

SEQ ID NO: 827 - protein, 12 aa, Artificial Sequence
  source: /note="Description of Artificial Sequence: Synthetic peptide"
RASQSVSSAYLA

SEQ ID NO: 828 - protein, 11 aa, Artificial Sequence
  source: /note="Description of Artificial Sequence: Synthetic peptide"
RASQSVSNSLA

SEQ ID NO: 829 - protein, 12 aa, Artificial Sequence
  source: /note="Description of Artificial Sequence: Synthetic peptide"
RASQSVSSSFLA

SEQ ID NO: 830 - protein, 12 aa, Artificial Sequence
  source: /note="Description of Artificial Sequence: Synthetic peptide"
RASQSVSTTFLA

SEQ ID NO: 831 - protein, 11 aa, Artificial Sequence
  source: /note="Description of Artificial Sequence: Synthetic peptide"
RASQSISSYLN

SEQ ID NO: 832 - protein, 12 aa, Artificial Sequence
  source: /note="Description of Artificial Sequence: Synthetic peptide"
RATQSIGSSFLA

SEQ ID NO: 833 - protein, 12 aa, Artificial Sequence
  source: /note="Description of Artificial Sequence: Synthetic peptide"
RASQSVSSSYLA

SEQ ID NO: 834 - protein, 12 aa, Artificial Sequence
  source: /note="Description of Artificial Sequence: Synthetic peptide"
RASQSVSSSYLA

SEQ ID NO: 835 - protein, 12 aa, Artificial Sequence
  source: /note="Description of Artificial Sequence: Synthetic peptide"
RASQRVASNYLA

SEQ ID NO: 836 - protein, 12 aa, Artificial Sequence
  source: /note="Description of Artificial Sequence: Synthetic peptide"
RASQSLSSNFLA

SEQ ID NO: 837 - protein, 16 aa, Artificial Sequence
  source: /note="Description of Artificial Sequence: Synthetic peptide"
RSSQSLLHSNGYNYLD

SEQ ID NO: 838 - protein, 12 aa, Artificial Sequence
  source: /note="Description of Artificial Sequence: Synthetic peptide"
RASQSVSSSYLA

SEQ ID NO: 839 - protein, 12 aa, Artificial Sequence
  source: /note="Description of Artificial Sequence: Synthetic peptide"
RASQSVASSFLA

SEQ ID NO: 840 - protein, 11 aa, Artificial Sequence
  source: /note="Description of Artificial Sequence: Synthetic peptide"
RASQDVNTAVS

SEQ ID NO: 841 - protein, 15 aa, Artificial Sequence
  source: /note="Description of Artificial Sequence: Synthetic peptide"
RASESVSVIGAHLIH

SEQ ID NO: 842 - protein, 15 aa, Artificial Sequence
  source: /note="Description of Artificial Sequence: Synthetic peptide"
RASESVTILGSHLIY

SEQ ID NO: 843 - protein, 15 aa, Artificial Sequence
  source: /note="Description of Artificial Sequence: Synthetic peptide"
RASESVTILGSHLIY

SEQ ID NO: 844 - protein, 7 aa, Artificial Sequence
  source: /note="Description of Artificial Sequence: Synthetic peptide"
GASRRAT

SEQ ID NO: 845 - protein, 7 aa, Artificial Sequence
  source: /note="Description of Artificial Sequence: Synthetic peptide"
LGSNRAS

SEQ ID NO: 846 - protein, 7 aa, Artificial Sequence
  source: /note="Description of Artificial Sequence: Synthetic peptide"
EVSNRFS

SEQ ID NO: 847 - protein, 7 aa, Artificial Sequence
  source: /note="Description of Artificial Sequence: Synthetic peptide"
LGSKRAS

SEQ ID NO: 848 - protein, 7 aa, Artificial Sequence
  source: /note="Description of Artificial Sequence: Synthetic peptide"
GASTLAS

SEQ ID NO: 849 - protein, 7 aa, Artificial Sequence
  source: /note="Description of Artificial Sequence: Synthetic peptide"
LGSNRAS

SEQ ID NO: 850 - protein, 7 aa, Artificial Sequence
  source: /note="Description of Artificial Sequence: Synthetic peptide"
GASTRAS

SEQ ID NO: 851 - protein, 7 aa, Artificial Sequence
  source: /note="Description of Artificial Sequence: Synthetic peptide"
GASIRAT

SEQ ID NO: 852 - protein, 7 aa, Artificial Sequence
  source: /note="Description of Artificial Sequence: Synthetic peptide"
DASNRAT

SEQ ID NO: 853 - protein, 7 aa, Artificial Sequence
  source: /note="Description of Artificial Sequence: Synthetic peptide"
AASSLQS

SEQ ID NO: 854 - protein, 7 aa, Artificial Sequence
  source: /note="Description of Artificial Sequence: Synthetic peptide"
AASSLQS

SEQ ID NO: 855 - protein, 7 aa, Artificial Sequence
  source: /note="Description of Artificial Sequence: Synthetic peptide"
EVSNRDS

SEQ ID NO: 856 - protein, 7 aa, Artificial Sequence
  source: /note="Description of Artificial Sequence: Synthetic peptide"
DASTLQT

SEQ ID NO: 857 - protein, 7 aa, Artificial Sequence
  source: /note="Description of Artificial Sequence: Synthetic peptide"
GASTRAT

SEQ ID NO: 858 - protein, 7 aa, Artificial Sequence
  source: /note="Description of Artificial Sequence: Synthetic peptide"
GASSRAS

SEQ ID NO: 859 - protein, 7 aa, Artificial Sequence
  source: /note="Description of Artificial Sequence: Synthetic peptide"
SATSPVP

SEQ ID NO: 860 - protein, 7 aa, Artificial Sequence
  source: /note="Description of Artificial Sequence: Synthetic peptide"
AANKSQS

SEQ ID NO: 861 - protein, 7 aa, Artificial Sequence
  source: /note="Description of Artificial Sequence: Synthetic peptide"
LGSNRAS

SEQ ID NO: 862 - protein, 7 aa, Artificial Sequence
  source: /note="Description of Artificial Sequence: Synthetic peptide"
DDSVRPS

SEQ ID NO: 863 - protein, 7 aa, Artificial Sequence
  source: /note="Description of Artificial Sequence: Synthetic peptide"
RDKERPS

SEQ ID NO: 864 - protein, 7 aa, Artificial Sequence
  source: /note="Description of Artificial Sequence: Synthetic peptide"
AASNLQS

SEQ ID NO: 865 - protein, 7 aa, Artificial Sequence
  source: /note="Description of Artificial Sequence: Synthetic peptide"
GKNNRPS

SEQ ID NO: 866 - protein, 7 aa, Artificial Sequence
  source: /note="Description of Artificial Sequence: Synthetic peptide"
GTNNRPS

SEQ ID NO: 867 - protein, 7 aa, Artificial Sequence
  source: /note="Description of Artificial Sequence: Synthetic peptide"
GASTRAT

SEQ ID NO: 868 - protein, 7 aa, Artificial Sequence
  source: /note="Description of Artificial Sequence: Synthetic peptide"
DASSRAT

SEQ ID NO: 869 - protein, 7 aa, Artificial Sequence
  source: /note="Description of Artificial Sequence: Synthetic peptide"
GASSRAT

SEQ ID NO: 870 - protein, 7 aa, Artificial Sequence
  source: /note="Description of Artificial Sequence: Synthetic peptide"
GSSNRAT

SEQ ID NO: 871 - protein, 7 aa, Artificial Sequence
  source: /note="Description of Artificial Sequence: Synthetic peptide"
AASSLQS

SEQ ID NO: 872 - protein, 7 aa, Artificial Sequence
  source: /note="Description of Artificial Sequence: Synthetic peptide"
GASQRAT

SEQ ID NO: 873 - protein, 7 aa, Artificial Sequence
  source: /note="Description of Artificial Sequence: Synthetic peptide"
GASSRAT

SEQ ID NO: 874 - protein, 7 aa, Artificial Sequence
  source: /note="Description of Artificial Sequence: Synthetic peptide"
GASSRAT

SEQ ID NO: 875 - protein, 7 aa, Artificial Sequence
  source: /note="Description of Artificial Sequence: Synthetic peptide"
GASSRAT

SEQ ID NO: 876 - protein, 7 aa, Artificial Sequence
  source: /note="Description of Artificial Sequence: Synthetic peptide"
GASNWAT

SEQ ID NO: 877 - protein, 7 aa, Artificial Sequence
  source: /note="Description of Artificial Sequence: Synthetic peptide"
LGSNRAS

SEQ ID NO: 878 - protein, 7 aa, Artificial Sequence
  source: /note="Description of Artificial Sequence: Synthetic peptide"
GTSSRAT

SEQ ID NO: 879 - protein, 7 aa, Artificial Sequence
  source: /note="Description of Artificial Sequence: Synthetic peptide"
GASGRAT

SEQ ID NO: 880 - protein, 7 aa, Artificial Sequence
  source: /note="Description of Artificial Sequence: Synthetic peptide"
SASYRYT

SEQ ID NO: 881 - protein, 7 aa, Artificial Sequence
  source: /note="Description of Artificial Sequence: Synthetic peptide"
LASNLET

SEQ ID NO: 882 - protein, 7 aa, Artificial Sequence
  source: /note="Description of Artificial Sequence: Synthetic peptide"
LASNVQT

SEQ ID NO: 883 - protein, 7 aa, Artificial Sequence
  source: /note="Description of Artificial Sequence: Synthetic peptide"
LASNVQT

SEQ ID NO: 884 - protein, 10 aa, Artificial Sequence
  source: /note="Description of Artificial Sequence: Synthetic peptide"
QQYHSSPSWT

SEQ ID NO: 885 - protein, 9 aa, Artificial Sequence
  source: /note="Description of Artificial Sequence: Synthetic peptide"
MQALQTPYT

SEQ ID NO: 886 - protein, 8 aa, Artificial Sequence
  source: /note="Description of Artificial Sequence: Synthetic peptide"
MQNIQFPS

SEQ ID NO: 887 - protein, 9 aa, Artificial Sequence
  source: /note="Description of Artificial Sequence: Synthetic peptide"
MQALQTPYT

SEQ ID NO: 888 - protein, 8 aa, Artificial Sequence
  source: /note="Description of Artificial Sequence: Synthetic peptide"
QQSYKRAS

SEQ ID NO: 889 - protein, 9 aa, Artificial Sequence
  source: /note="Description of Artificial Sequence: Synthetic peptide"
MQGRQFPYS

SEQ ID NO: 890 - protein, 8 aa, Artificial Sequence
  source: /note="Description of Artificial Sequence: Synthetic peptide"
QQYGSSLT

SEQ ID NO: 891 - protein, 9 aa, Artificial Sequence
  source: /note="Description of Artificial Sequence: Synthetic peptide"
QQYGSSSWT

SEQ ID NO: 892 - protein, 10 aa, Artificial Sequence
  source: /note="Description of Artificial Sequence: Synthetic peptide"
QQYGSSPPWT

SEQ ID NO: 893 - protein, 7 aa, Artificial Sequence
  source: /note="Description of Artificial Sequence: Synthetic peptide"
QQSYTLA

SEQ ID NO: 894 - protein, 9 aa, Artificial Sequence
  source: /note="Description of Artificial Sequence: Synthetic peptide"
QQSYSTPYT

SEQ ID NO: 895 - protein, 9 aa, Artificial Sequence
  source: /note="Description of Artificial Sequence: Synthetic peptide"
MQGTHWPGT

SEQ ID NO: 896 - protein, 9 aa, Artificial Sequence
  source: /note="Description of Artificial Sequence: Synthetic peptide"
QQYESLPLT

SEQ ID NO: 897 - protein, 10 aa, Artificial Sequence
  source: /note="Description of Artificial Sequence: Synthetic peptide"
QQYNDWLPVT

SEQ ID NO: 898 - protein, 10 aa, Artificial Sequence
  source: /note="Description of Artificial Sequence: Synthetic peptide"
QQYAGSPPFT

SEQ ID NO: 899 - protein, 9 aa, Artificial Sequence
  source: /note="Description of Artificial Sequence: Synthetic peptide"
LQHDNFPLT

SEQ ID NO: 900 - protein, 9 aa, Artificial Sequence
  source: /note="Description of Artificial Sequence: Synthetic peptide"
QHYYRFPYS

SEQ ID NO: 901 - protein, 9 aa, Artificial Sequence
  source: /note="Description of Artificial Sequence: Synthetic peptide"
MQALQTPYT

SEQ ID NO: 902 - protein, 11 aa, Artificial Sequence
  source: /note="Description of Artificial Sequence: Synthetic peptide"
QVWDSDSEHVV

SEQ ID NO: 903 - protein, 9 aa, Artificial Sequence
  source: /note="Description of Artificial Sequence: Synthetic peptide"
QAWDDTTVV

SEQ ID NO: 904 - protein, 9 aa, Artificial Sequence
  source: /note="Description of Artificial Sequence: Synthetic peptide"
QKYNSAPFT

SEQ ID NO: 905 - protein, 12 aa, Artificial Sequence
  source: /note="Description of Artificial Sequence: Synthetic peptide"
SSRDSSGDHLRV

SEQ ID NO: 906 - protein, 11 aa, Artificial Sequence
  source: /note="Description of Artificial Sequence: Synthetic peptide"
NSRDSSGHHLL

SEQ ID NO: 907 - protein, 14 aa, Artificial Sequence
  source: /note="Description of Artificial Sequence: Synthetic peptide"
QHYGSSFNGSSLFT

SEQ ID NO: 908 - protein, 10 aa, Artificial Sequence
  source: /note="Description of Artificial Sequence: Synthetic peptide"
QQFGTSSGLT

SEQ ID NO: 909 - protein, 10 aa, Artificial Sequence
  source: /note="Description of Artificial Sequence: Synthetic peptide"
QQYHSSPSWT

SEQ ID NO: 910 - protein, 10 aa, Artificial Sequence
  source: /note="Description of Artificial Sequence: Synthetic peptide"
QQYHSSPSWT

SEQ ID NO: 911 - protein, 9 aa, Artificial Sequence
  source: /note="Description of Artificial Sequence: Synthetic peptide"
QQSYSTPYS

SEQ ID NO: 912 - protein, 10 aa, Artificial Sequence
  source: /note="Description of Artificial Sequence: Synthetic peptide"
QHYESSPSWT

SEQ ID NO: 913 - protein, 10 aa, Artificial Sequence
  source: /note="Description of Artificial Sequence: Synthetic peptide"
QQYGSPPRFT

SEQ ID NO: 914 - protein, 10 aa, Artificial Sequence
  source: /note="Description of Artificial Sequence: Synthetic peptide"
QHYGSSPSWT

SEQ ID NO: 915 - protein, 10 aa, Artificial Sequence
  source: /note="Description of Artificial Sequence: Synthetic peptide"
QHYDSSPSWT

SEQ ID NO: 916 - protein, 10 aa, Artificial Sequence
  source: /note="Description of Artificial Sequence: Synthetic peptide"
QYYGTSPMYT

SEQ ID NO: 917 - protein, 9 aa, Artificial Sequence
  source: /note="Description of Artificial Sequence: Synthetic peptide"
MQALQTPLT

SEQ ID NO: 918 - protein, 11 aa, Artificial Sequence
  source: /note="Description of Artificial Sequence: Synthetic peptide"
QHYGNSPPKFT

SEQ ID NO: 919 - protein, 10 aa, Artificial Sequence
  source: /note="Description of Artificial Sequence: Synthetic peptide"
QHYGGSPRLT

SEQ ID NO: 920 - protein, 9 aa, Artificial Sequence
  source: /note="Description of Artificial Sequence: Synthetic peptide"
QQHYSTPWT

SEQ ID NO: 921 - protein, 9 aa, Artificial Sequence
  source: /note="Description of Artificial Sequence: Synthetic peptide"
LQSRIFPRT

SEQ ID NO: 922 - protein, 9 aa, Artificial Sequence
  source: /note="Description of Artificial Sequence: Synthetic peptide"
LQSRTIPRT

SEQ ID NO: 923 - protein, 9 aa, Artificial Sequence
  source: /note="Description of Artificial Sequence: Synthetic peptide"
LQSRTIPRT

SEQ ID NO: 924-948 - skipped (25 entries)

SEQ ID NO: 949 - protein, 490 aa, Artificial Sequence
  source: /note="Description of Artificial Sequence: Synthetic polypeptide"
MALPVTALLLPLALLLHAARPQVQLVESGGGLVQPGRSLRLSCAASGFTFSNYAMSWVRQAPGKGLGWVSGISRSGENTYYADSVKGRFTISRDNSKNTLYLQMNSLRDEDTAVYYCARSPAHYYGGMDVWGQGTTVTVSSASGGGGSGGRASGGGGSDIVLTQSPGTLSLSPGERATLSCRASQSISSSFLAWYQQKPGQAPRLLIYGASRRATGIPDRFSGSGSGTDFTLTISRLEPEDSAVYYCQQYHSSPSWTFGQGTKLEIKTTTPAPRPPTPAPTIASQPLSLRPEACRPAAGGAVHTRGLDFACDIYIWAPLAGTCGVLLLSLVITLYCKRGRKKLLYIFKQPFMRPVQTTQEEDGCSCRFPEEEEGGCELRVKFSRSADAPAYKQGQNQLYNELNLGRREEYDVLDKRRGRDPEMGGKPRRKNPQEGLYNELQKDKMAEAYSEIGMKGERRRGKGHDGLYQGLSTATKDTYDALHMQALPPR

SEQ ID NO: 950 - protein, 488 aa, Artificial Sequence
  source: /note="Description of Artificial Sequence: Synthetic polypeptide"
MALPVTALLLPLALLLHAARPQVQLVESGGGLVQPGRSLRLSCAASGFTFDDYAMHWVRQAPGKGLEWVSGISWNSGSIGYADSVKGRFTISRDNAKNSLYLQMNSLRAEDTALYYCSVHSFLAYWGQGTLVTVSSASGGGGSGGRASGGGGSDIVMTQTPLSLPVTPGEPASISCRSSQSLLHSNGYNYLDWYLQKPGQSPQLLIYLGSNRASGVPDRFSGSGSGTDFTLKISRVEAEDVGVYYCMQALQTPYTFGQGTKVEIKTTTPAPRPPTPAPTIASQPLSLRPEACRPAAGGAVHTRGLDFACDIYIWAPLAGTCGVLLLSLVITLYCKRGRKKLLYIFKQPFMRPVQTTQEEDGCSCRFPEEEEGGCELRVKFSRSADAPAYKQGQNQLYNELNLGRREEYDVLDKRRGRDPEMGGKPRRKNPQEGLYNELQKDKMAEAYSEIGMKGERRRGKGHDGLYQGLSTATKDTYDALHMQALPPR

SEQ ID NO: 951 - protein, 487 aa, Artificial Sequence
  source: /note="Description of Artificial Sequence: Synthetic polypeptide"
MALPVTALLLPLALLLHAARPEVQLLESGGGLVQPGGSLRLSCAVSGFALSNHGMSWVRRAPGKGLEWVSGIVYSGSTYYAASVKGRFTISRDNSRNTLYLQMNSLRPEDTAIYYCSAHGGESDVWGQGTTVTVSSASGGGGSGGRASGGGGSDIVMTQTPLSLSVTPGQPASISCKSSQSLLRNDGKTPLYWYLQKAGQPPQLLIYEVSNRFSGVPDRFSGSGSGTDFTLKISRVEAEDVGAYYCMQNIQFPSFGGGTKLEIKTTTPAPRPPTPAPTIASQPLSLRPEACRPAAGGAVHTRGLDFACDIYIWAPLAGTCGVLLLSLVITLYCKRGRKKLLYIFKQPFMRPVQTTQEEDGCSCRFPEEEEGGCELRVKFSRSADAPAYKQGQNQLYNELNLGRREEYDVLDKRRGRDPEMGGKPRRKNPQEGLYNELQKDKMAEAYSEIGMKGERRRGKGHDGLYQGLSTATKDTYDALHMQALPPR

SEQ ID NO: 952 - protein, 493 aa, Artificial Sequence
  source: /note="Description of Artificial Sequence: Synthetic polypeptide"
MALPVTALLLPLALLLHAARPQVQLVQSGAEVRKTGASVKVSCKASGYIFDNFGINWVRQAPGQGLEWMGWINPKNNNTNYAQKFQGRVTITADESTNTAYMEVSSLRSEDTAVYYCARGPYYYQSYMDVWGQGTMVTVSSASGGGGSGGRASGGGGSDIVMTQTPLSLPVTPGEPASISCRSSQSLLHSNGYNYLNWYLQKPGQSPQLLIYLGSKRASGVPDRFSGSGSGTDFTLHITRVGAEDVGVYYCMQALQTPYTFGQGTKLEIKTTTPAPRPPTPAPTIASQPLSLRPEACRPAAGGAVHTRGLDFACDIYIWAPLAGTCGVLLLSLVITLYCKRGRKKLLYIFKQPFMRPVQTTQEEDGCSCRFPEEEEGGCELRVKFSRSADAPAYKQGQNQLYNELNLGRREEYDVLDKRRGRDPEMGGKPRRKNPQEGLYNELQKDKMAEAYSEIGMKGERRRGKGHDGLYQGLSTATKDTYDALHMQALPPR

SEQ ID NO: 953 - protein, 490 aa, Artificial Sequence
  source: /note="Description of Artificial Sequence: Synthetic polypeptide"
MALPVTALLLPLALLLHAARPQVQLQESGGGLVQPGGSLRLSCAASGFTFSSDAMTWVRQAPGKGLEWVSVISGSGGTTYYADSVKGRFTISRDNSKNTLYLQMNSLRAEDTAVYYCAKLDSSGYYYARGPRYWGQGTLVTVSSASGGGGSGGRASGGGGSDIQLTQSPSSLSASVGDRVTITCRASQSISSYLNWYQQKPGKAPKLLIYGASTLASGVPARFSGSGSGTHFTLTINSLQSEDSATYYCQQSYKRASFGQGTKVEIKTTTPAPRPPTPAPTIASQPLSLRPEACRPAAGGAVHTRGLDFACDIYIWAPLAGTCGVLLLSLVITLYCKRGRKKLLYIFKQPFMRPVQTTQEEDGCSCRFPEEEEGGCELRVKFSRSADAPAYKQGQNQLYNELNLGRREEYDVLDKRRGRDPEMGGKPRRKNPQEGLYNELQKDKMAEAYSEIGMKGERRRGKGHDGLYQGLSTATKDTYDALHMQALPPR

SEQ ID NO: 954 - protein, 491 aa, Artificial Sequence
  source: /note="Description of Artificial Sequence: Synthetic polypeptide"
MALPVTALLLPLALLLHAARPQVQLVQSGAEVKKPGASVKVSCKASGYTFSNYGITWVRQAPGQGLEWMGWISAYNGNTNYAQKFQGRVTMTRNTSISTAYMELSSLRSEDTAVYYCARGPYYYYMDVWGKGTMVTVSSASGGGGSGGRASGGGGSEIVMTQSPLSLPVTPGEPASISCRSSQSLLYSNGYNYVDWYLQKPGQSPQLLIYLGSNRASGVPDRFSGSGSGTDFKLQISRVEAEDVGIYYCMQGRQFPYSFGQGTKVEIKTTTPAPRPPTPAPTIASQPLSLRPEACRPAAGGAVHTRGLDFACDIYIWAPLAGTCGVLLLSLVITLYCKRGRKKLLYIFKQPFMRPVQTTQEEDGCSCRFPEEEEGGCELRVKFSRSADAPAYKQGQNQLYNELNLGRREEYDVLDKRRGRDPEMGGKPRRKNPQEGLYNELQKDKMAEAYSEIGMKGERRRGKGHDGLYQGLSTATKDTYDALHMQALPPR

SEQ ID NO: 955 - protein, 482 aa, Artificial Sequence
  source: /note="Description of Artificial Sequence: Synthetic polypeptide"
MALPVTALLLPLALLLHAARPEVQLLETGGGLVQPGGSLRLSCAVSGFALSNHGMSWVRRAPGKGLEWVSGIVYSGSTYYAASVKGRFTISRDNSRNTLYLQMNSLRPEDTAIYYCSAHGGESDVWGQGTTVTVSSASGGGGSGGRASGGGGSEIVLTQSPATLSVSPGESATLSCRASQSVSSNLAWYQQKPGQAPRLLIYGASTRASGIPDRFSGSGSGTDFTLTISSLQAEDVAVYYCQQYGSSLTFGGGTKVEIKTTTPAPRPPTPAPTIASQPLSLRPEACRPAAGGAVHTRGLDFACDIYIWAPLAGTCGVLLLSLVITLYCKRGRKKLLYIFKQPFMRPVQTTQEEDGCSCRFPEEEEGGCELRVKFSRSADAPAYKQGQNQLYNELNLGRREEYDVLDKRRGRDPEMGGKPRRKNPQEGLYNELQKDKMAEAYSEIGMKGERRRGKGHDGLYQGLSTATKDTYDALHMQALPPR

SEQ ID NO: 956 - protein, 483 aa, Artificial Sequence
  source: /note="Description of Artificial Sequence: Synthetic polypeptide"
MALPVTALLLPLALLLHAARPEVQLVETGGGLVQPGGSLRLSCAVSGFALSNHGMSWVRRAPGKGLEWVSGIVYSGSTYYAASVKGRFTISRDNSRNTLYLQMNSLRPEDTAIYYCSAHGGESDVWGQGTTVTVSSASGGGGSGGRASGGGGSEIVMTQSPATLSVSPGERATLSCRASQSVSSKLAWYQQKPGQAPRLLMYGASIRATGIPDRFSGSGSGTEFTLTISSLEPEDFAVYYCQQYGSSSWTFGQGTKVEIKTTTPAPRPPTPAPTIASQPLSLRPEACRPAAGGAVHTRGLDFACDIYIWAPLAGTCGVLLLSLVITLYCKRGRKKLLYIFKQPFMRPVQTTQEEDGCSCRFPEEEEGGCELRVKFSRSADAPAYKQGQNQLYNELNLGRREEYDVLDKRRGRDPEMGGKPRRKNPQEGLYNELQKDKMAEAYSEIGMKGERRRGKGHDGLYQGLSTATKDTYDALHMQALPPR

SEQ ID NO: 957 - protein, 485 aa, Artificial Sequence
  source: /note="Description of Artificial Sequence: Synthetic polypeptide"
MALPVTALLLPLALLLHAARPEVQLVETGGGVVQPGGSLRLSCAVSGFALSNHGMSWVRRAPGKGLEWVSGIVYSGSTYYAASVKGRFTISRDNSRNTLYLQMNSLRPEDTAIYYCSAHGGESDVWGQGTTVTVSSASGGGGSGGRASGGGGSEIVLTQSPGTLSLSPGERATLSCRASQSVGSTNLAWYQQKPGQAPRLLIYDASNRATGIPDRFSGGGSGTDFTLTISRLEPEDFAVYYCQQYGSSPPWTFGQGTKVEIKTTTPAPRPPTPAPTIASQPLSLRPEACRPAAGGAVHTRGLDFACDIYIWAPLAGTCGVLLLSLVITLYCKRGRKKLLYIFKQPFMRPVQTTQEEDGCSCRFPEEEEGGCELRVKFSRSADAPAYKQGQNQLYNELNLGRREEYDVLDKRRGRDPEMGGKPRRKNPQEGLYNELQKDKMAEAYSEIGMKGERRRGKGHDGLYQGLSTATKDTYDALHMQALPPR

SEQ ID NO: 958 - protein, 483 aa, Artificial Sequence
  source: /note="Description of Artificial Sequence: Synthetic polypeptide"
MALPVTALLLPLALLLHAARPQVQLVESGGGLVKPGGSLRLSCAASGFTFSDYYMSWIRQAPGKGLEWVSYISSSGSTIYYADSVKGRFTISRDNAKNSLYLQMNSLRAEDTAVYYCARESGDGMDVWGQGTTVTVSSASGGGGSGGRASGGGGSDIQMTQSPSSLSASVGDRVTITCRASQSISSYLNWYQQKPGKAPKLLIYAASSLQSGVPSRFSGSGSGTDFTLTISSLQPEDFATYYCQQSYTLAFGQGTKVDIKTTTPAPRPPTPAPTIASQPLSLRPEACRPAAGGAVHTRGLDFACDIYIWAPLAGTCGVLLLSLVITLYCKRGRKKLLYIFKQPFMRPVQTTQEEDGCSCRFPEEEEGGCELRVKFSRSADAPAYKQGQNQLYNELNLGRREEYDVLDKRRGRDPEMGGKPRRKNPQEGLYNELQKDKMAEAYSEIGMKGERRRGKGHDGLYQGLSTATKDTYDALHMQALPPR

SEQ ID NO: 959 - protein, 483 aa, Artificial Sequence
  source: /note="Description of Artificial Sequence: Synthetic polypeptide"
MALPVTALLLPLALLLHAARPEVQLVESGGGLVQPGGSLRLSCAVSGFALSNHGMSWVRRAPGKGLEWVSGIVYSGSTYYAASVKGRFTISRDNSRNTLYLQMNSLRPEDTAIYYCSAHGGESDVWGQGTTVTVSSASGGGGSGGRASGGGGSDIQLTQSPSSLSASVGDRVTITCRASQSISSYLNWYQQKPGKAPKLLIYAASSLQSGVPSRFSGSGSGTDFTLTISSLQPEDFATYYCQQSYSTPYTFGQGTKVEIKTTTPAPRPPTPAPTIASQPLSLRPEACRPAAGGAVHTRGLDFACDIYIWAPLAGTCGVLLLSLVITLYCKRGRKKLLYIFKQPFMRPVQTTQEEDGCSCRFPEEEEGGCELRVKFSRSADAPAYKQGQNQLYNELNLGRREEYDVLDKRRGRDPEMGGKPRRKNPQEGLYNELQKDKMAEAYSEIGMKGERRRGKGHDGLYQGLSTATKDTYDALHMQALPPR

SEQ ID NO: 960 - protein, 490 aa, Artificial Sequence
  source: /note="Description of Artificial Sequence: Synthetic polypeptide"
MALPVTALLLPLALLLHAARPQVQLVQSGGGLVKPGGSLRLSCAASGFTFSDYYMSWIRQAPGKGLEWVSYISSSGNTIYYADSVKGRFTISRDNAKNSLYLQMNSLRAEDTAVYYCARSTMVREDYWGQGTLVTVSSASGGGGSGGRASGGGGSDIVLTQSPLSLPVTLGQPASISCKSSESLVHNSGKTYLNWFHQRPGQSPRRLIYEVSNRDSGVPDRFTGSGSGTDFTLKISRVEAEDVGVYYCMQGTHWPGTFGQGTKLEIKTTTPAPRPPTPAPTIASQPLSLRPEACRPAAGGAVHTRGLDFACDIYIWAPLAGTCGVLLLSLVITLYCKRGRKKLLYIFKQPFMRPVQTTQEEDGCSCRFPEEEEGGCELRVKFSRSADAPAYKQGQNQLYNELNLGRREEYDVLDKRRGRDPEMGGKPRRKNPQEGLYNELQKDKMAEAYSEIGMKGERRRGKGHDGLYQGLSTATKDTYDALHMQALPPR

SEQ ID NO: 961 - protein, 483 aa, Artificial Sequence
  source: /note="Description of Artificial Sequence: Synthetic polypeptide"
MALPVTALLLPLALLLHAARPQVQLVESGGGLVQPGGSLRLSCAVSGFALSNHGMSWVRRAPGKGLEWVSGIVYSGSTYYAASVKGRFTISRDNSRNTLYLQMNSLRPEDTAIYYCSAHGGESDVWGQGTTVTVSSASGGGGSGGRASGGGGSDIRLTQSPSPLSASVGDRVTITCQASEDINKFLNWYHQTPGKAPKLLIYDASTLQTGVPSRFSGSGSGTDFTLTINSLQPEDIGTYYCQQYESLPLTFGGGTKVEIKTTTPAPRPPTPAPTIASQPLSLRPEACRPAAGGAVHTRGLDFACDIYIWAPLAGTCGVLLLSLVITLYCKRGRKKLLYIFKQPFMRPVQTTQEEDGCSCRFPEEEEGGCELRVKFSRSADAPAYKQGQNQLYNELNLGRREEYDVLDKRRGRDPEMGGKPRRKNPQEGLYNELQKDKMAEAYSEIGMKGERRRGKGHDGLYQGLSTATKDTYDALHMQALPPR

SEQ ID NO: 962 - protein, 484 aa, Artificial Sequence
  source: /note="Description of Artificial Sequence: Synthetic polypeptide"
MALPVTALLLPLALLLHAARPEVQLVETGGGLVQPGGSLRLSCAVSGFALSNHGMSWVRRAPGKGLEWVSGIVYSGSTYYAASVKGRFTISRDNSRNTLYLQMNSLRPEDTAIYYCSAHGGESDVWGQGTTVTVSSASGGGGSGGRASGGGGSETTLTQSPATLSVSPGERATLSCRASQSVGSNLAWYQQKPGQGPRLLIYGASTRATGIPARFSGSGSGTEFTLTISSLQPEDFAVYYCQQYNDWLPVTFGQGTKVEIKTTTPAPRPPTPAPTIASQPLSLRPEACRPAAGGAVHTRGLDFACDIYIWAPLAGTCGVLLLSLVITLYCKRGRKKLLYIFKQPFMRPVQTTQEEDGCSCRFPEEEEGGCELRVKFSRSADAPAYKQGQNQLYNELNLGRREEYDVLDKRRGRDPEMGGKPRRKNPQEGLYNELQKDKMAEAYSEIGMKGERRRGKGHDGLYQGLSTATKDTYDALHMQALPPR

SEQ ID NO: 963 - protein, 485 aa, Artificial Sequence
  source: /note="Description of Artificial Sequence: Synthetic polypeptide"
MALPVTALLLPLALLLHAARPEVQLVESGGGLVQPGGSLRLSCAVSGFALSNHGMSWVRRAPGKGLEWVSGIVYSGSTYYAASVKGRFTISRDNSRNTLYLQMNSLRPEDTAIYYCSAHGGESDVWGQGTTVTVSSASGGGGSGGRASGGGGSEIVLTQSPGTLSLSPGERATLSCRASQSIGSSSLAWYQQKPGQAPRLLMYGASSRASGIPDRFSGSGSGTDFTLTISRLEPEDFAVYYCQQYAGSPPFTFGQGTKVEIKTTTPAPRPPTPAPTIASQPLSLRPEACRPAAGGAVHTRGLDFACDIYIWAPLAGTCGVLLLSLVITLYCKRGRKKLLYIFKQPFMRPVQTTQEEDGCSCRFPEEEEGGCELRVKFSRSADAPAYKQGQNQLYNELNLGRREEYDVLDKRRGRDPEMGGKPRRKNPQEGLYNELQKDKMAEAYSEIGMKGERRRGKGHDGLYQGLSTATKDTYDALHMQALPPR

SEQ ID NO: 964 - DNA, 1470 bp, Artificial Sequence
  source: /note="Description of Artificial Sequence: Synthetic polynucleotide"
atggccctccctgtcaccgccctgctgcttccgctggctcttctgctccacgccgctcggccccaagtgcaactcgtggaatctggtggaggactcgtgcaacccggaagatcgcttagactgtcgtgtgccgccagcgggttcactttctcgaactacgcgatgtcctgggtccgccaggcacccggaaagggactcggttgggtgtccggcatttcccggtccggcgaaaatacctactacgccgactccgtgaagggccgcttcaccatctcaagggacaacagcaaaaacaccctgtacttgcaaatgaactccctgcgggatgaagatacagccgtgtactattgcgcccggtcgcctgcccattactacggcggaatggacgtctggggacagggaaccactgtgactgtcagcagcgcgtcgggtggcggcggctcagggggtcgggcctccggggggggagggtccgacatcgtgctgacccagtccccgggaaccctgagcctgagcccgggagagcgcgcgaccctgtcatgccgggcatcccagagcattagctcctcctttctcgcctggtatcagcagaagcccggacaggccccgaggctgctgatctacggcgctagcagaagggctaccggaatcccagaccggttctccggctccggttccgggaccgatttcacccttactatctcgcgcctggaacctgaggactccgccgtctactactgccagcagtaccactcatccccgtcgtggacgttcggacagggcaccaagctggagattaagaccactaccccagcaccgaggccacccaccccggctcctaccatcgcctcccagcctctgtccctgcgtccggaggcatgtagacccgcagctggtggggccgtgcatacccggggtcttgacttcgcctgcgatatctacatttgggcccctctggctggtacttgcggggtcctgctgctttcactcgtgatcactctttactgtaagcgcggtcggaagaagctgctgtacatctttaagcaacccttcatgaggcctgtgcagactactcaagaggaggacggctgttcatgccggttcccagaggaggaggaaggcggctgcgaactgcgcgtgaaattcagccgcagcgcagatgctccagcctacaagcaggggcagaaccagctctacaacgaactcaatcttggtcggagagaggagtacgacgtgctggacaagcggagaggacgggacccagaaatgggcgggaagccgcgcagaaagaatccccaagagggcctgtacaacgagctccaaaaggataagatggcagaagcctatagcgagattggtatgaaaggggaacgcagaagaggcaaaggccacgacggactgtaccagggactcagcaccgccaccaaggacacctatgacgctcttcacatgcaggccctgccgcctcgg

SEQ ID NO: 965 - DNA, 1464 bp, Artificial Sequence
  source: /note="Description of Artificial Sequence: Synthetic polynucleotide"
atggccctccctgtcaccgccctgctgcttccgctggctcttctgctccacgccgctcggccccaagtgcaactcgtcgaatccggtggaggtctggtccaacctggtagaagcctgagactgtcgtgtgcggccagcggattcacctttgatgactatgctatgcactgggtgcggcaggccccaggaaagggcctggaatgggtgtcgggaattagctggaactccgggtccattggctacgccgactccgtgaagggccgcttcaccatctcccgcgacaacgcaaagaactccctgtacttgcaaatgaactcgctcagggctgaggataccgcgctgtactactgctccgtgcattccttcctggcctactggggacagggaactctggtcaccgtgtcgagcgcctccggcggcgggggctcgggtggacgggcctcgggcggaggggggtccgacatcgtgatgacccagaccccgctgagcttgcccgtgactcccggagagcctgcatccatctcctgccggtcatcccagtcccttctccactccaacggatacaactacctcgactggtacctccagaagccgggacagagccctcagcttctgatctacctggggtcaaatagagcctcaggagtgccggatcggttcagcggatctggttcgggaactgatttcactctgaagatttcccgcgtggaagccgaggacgtgggcgtctactactgtatgcaggcgctgcagaccccctataccttcggccaagggacgaaagtggagatcaagaccactaccccagcaccgaggccacccaccccggctcctaccatcgcctcccagcctctgtccctgcgtccggaggcatgtagacccgcagctggtggggccgtgcatacccggggtcttgacttcgcctgcgatatctacatttgggcccctctggctggtacttgcggggtcctgctgctttcactcgtgatcactctttactgtaagcgcggtcggaagaagctgctgtacatctttaagcaacccttcatgaggcctgtgcagactactcaagaggaggacggctgttcatgccggttcccagaggaggaggaaggcggctgcgaactgcgcgtgaaattcagccgcagcgcagatgctccagcctacaagcaggggcagaaccagctctacaacgaactcaatcttggtcggagagaggagtacgacgtgctggacaagcggagaggacgggacccagaaatgggcgggaagccgcgcagaaagaatccccaagagggcctgtacaacgagctccaaaaggataagatggcagaagcctatagcgagattggtatgaaaggggaacgcagaagaggcaaaggccacgacggactgtaccagggactcagcaccgccaccaaggacacctatgacgctcttcacatgcaggccctgccgcctcgg

SEQ ID NO: 966 - DNA, 1461 bp, Artificial Sequence
  source: /note="Description of Artificial Sequence: Synthetic polynucleotide"
atggccctccctgtcaccgccctgctgcttccgctggctcttctgctccacgccgctcggcccgaagtgcaattgttggaatctggaggaggacttgtgcagcctggaggatcactgagactttcgtgtgcggtgtcaggcttcgccctgagcaaccacggcatgagctgggtgcggagagccccggggaagggtctggaatgggtgtccgggatcgtctactccggttcaacttactacgccgcaagcgtgaagggtcgcttcaccatttcccgcgataactcccggaacaccctgtacctccaaatgaactccctgcggcccgaggacaccgccatctactactgttccgcgcatggaggagagtccgatgtctggggacagggcactaccgtgaccgtgtcgagcgcctcggggggaggaggctccggcggtcgcgcctccggggggggtggcagcgacattgtgatgacgcagactccactctcgctgtccgtgaccccgggacagcccgcgtccatctcgtgcaagagctcccagagcctgctgaggaacgacggaaagactcctctgtattggtacctccagaaggctggacagcccccgcaactgctcatctacgaagtgtcaaatcgcttctccggggtgccggatcggttttccggctcgggatcgggcaccgacttcaccctgaaaatctccagggtcgaggccgaggacgtgggagcctactactgcatgcaaaacatccagttcccttccttcggcggcggcacaaagctggagattaagaccactaccccagcaccgaggccacccaccccggctcctaccatcgcctcccagcctctgtccctgcgtccggaggcatgtagacccgcagctggtggggccgtgcatacccggggtcttgacttcgcctgcgatatctacatttgggcccctctggctggtacttgcggggtcctgctgctttcactcgtgatcactctttactgtaagcgcggtcggaagaagctgctgtacatctttaagcaacccttcatgaggcctgtgcagactactcaagaggaggacggctgttcatgccggttcccagaggaggaggaaggcggctgcgaactgcgcgtgaaattcagccgcagcgcagatgctccagcctacaagcaggggcagaaccagctctacaacgaactcaatcttggtcggagagaggagtacgacgtgctggacaagcggagaggacgggacccagaaatgggcgggaagccgcgcagaaagaatccccaagagggcctgtacaacgagctccaaaaggataagatggcagaagcctatagcgagattggtatgaaaggggaacgcagaagaggcaaaggccacgacggactgtaccagggactcagcaccgccaccaaggacacctatgacgctcttcacatgcaggccctgccgcctcgg

SEQ ID NO: 967 - DNA, 1479 bp, Artificial Sequence
  source: /note="Description of Artificial Sequence: Synthetic polynucleotide"
atggccctccctgtcaccgccctgctgcttccgctggctcttctgctccacgccgctcggccccaagtccaactcgtccagtccggcgcagaagtcagaaaaaccggtgctagcgtgaaagtgtcctgcaaggcctccggctacattttcgataacttcggaatcaactgggtcagacaggccccgggccaggggctggaatggatgggatggatcaaccccaagaacaacaacaccaactacgcacagaagttccagggccgcgtgactatcaccgccgatgaatcgaccaataccgcctacatggaggtgtcctccctgcggtcggaggacactgccgtgtattactgcgcgaggggcccatactactaccaaagctacatggacgtctggggacagggaaccatggtgaccgtgtcatccgcctccggtggtggaggctccggggggcgggcttcaggaggcggaggaagcgatattgtgatgacccagactccgcttagcctgcccgtgactcctggagaaccggcctccatttcctgccggtcctcgcaatcactcctgcattccaacggttacaactacctgaattggtacctccagaagcctggccagtcgccccagttgctgatctatctgggctcgaagcgcgcctccggggtgcctgaccggtttagcggatctgggagcggcacggacttcactctccacatcacccgcgtgggagcggaggacgtgggagtgtactactgtatgcaggcgctgcagactccgtacacattcggacagggcaccaagctggagatcaagaccactaccccagcaccgaggccacccaccccggctcctaccatcgcctcccagcctctgtccctgcgtccggaggcatgtagacccgcagctggtggggccgtgcatacccggggtcttgacttcgcctgcgatatctacatttgggcccctctggctggtacttgcggggtcctgctgctttcactcgtgatcactctttactgtaagcgcggtcggaagaagctgctgtacatctttaagcaacccttcatgaggcctgtgcagactactcaagaggaggacggctgttcatgccggttcccagaggaggaggaaggcggctgcgaactgcgcgtgaaattcagccgcagcgcagatgctccagcctacaagcaggggcagaaccagctctacaacgaactcaatcttggtcggagagaggagtacgacgtgctggacaagcggagaggacgggacccagaaatgggcgggaagccgcgcagaaagaatccccaagagggcctgtacaacgagctccaaaaggataagatggcagaagcctatagcgagattggtatgaaaggggaacgcagaagaggcaaaggccacgacggactgtaccagggactcagcaccgccaccaaggacacctatgacgctcttcacatgcaggccctgccgcctcgg

SEQ ID NO: 968 - DNA, 1470 bp, Artificial Sequence
  source: /note="Description of Artificial Sequence: Synthetic polynucleotide"
atggccctccctgtcaccgccctgctgcttccgctggctcttctgctccacgccgctcggccccaagtgcaacttcaagaatcaggcggaggactcgtgcagcccggaggatcattgcggctctcgtgcgccgcctcgggcttcaccttctcgagcgacgccatgacctgggtccgccaggccccggggaaggggctggaatgggtgtctgtgatttccggctccgggggaactacgtactacgccgattccgtgaaaggtcgcttcactatctcccgggacaacagcaagaacaccctttatctgcaaatgaattccctccgcgccgaggacaccgccgtgtactactgcgccaagctggactcctcgggctactactatgcccggggtccgagatactggggacagggaaccctcgtgaccgtgtcctccgcgtccggcggaggagggtcgggagggcgggcctccggcggcggcggttcggacatccagctgacccagtccccatcctcactgagcgcaagcgtgggcgacagagtcaccattacatgcagggcgtcccagagcatcagctcctacctgaactggtaccaacagaagcctggaaaggctcctaagctgttgatctacggggcttcgaccctggcatccggggtgcccgcgaggtttagcggaagcggtagcggcactcacttcactctgaccattaacagcctccagtccgaggattcagccacttactactgtcagcagtcctacaagcgggccagcttcggacagggcactaaggtcgagatcaagaccactaccccagcaccgaggccacccaccccggctcctaccatcgcctcccagcctctgtccctgcgtccggaggcatgtagacccgcagctggtggggccgtgcatacccggggtcttgacttcgcctgcgatatctacatttgggcccctctggctggtacttgcggggtcctgctgctttcactcgtgatcactctttactgtaagcgcggtcggaagaagctgctgtacatctttaagcaacccttcatgaggcctgtgcagactactcaagaggaggacggctgttcatgccggttcccagaggaggaggaaggcggctgcgaactgcgcgtgaaattcagccgcagcgcagatgctccagcctacaagcaggggcagaaccagctctacaacgaactcaatcttggtcggagagaggagtacgacgtgctggacaagcggagaggacgggacccagaaatgggcgggaagccgcgcagaaagaatccccaagagggcctgtacaacgagctccaaaaggataagatggcagaagcctatagcgagattggtatgaaaggggaacgcagaagaggcaaaggccacgacggactgtaccagggactcagcaccgccaccaaggacacctatgacgctcttcacatgcaggccctgccgcctcgg

SEQ ID NO: 969 - DNA, 1473 bp, Artificial Sequence
  source: /note="Description of Artificial Sequence: Synthetic polynucleotide"
atggccctccctgtcaccgccctgctgcttccgctggctcttctgctccacgccgctcggccccaagtccaactggtccagagcggtgcagaagtgaagaagcccggagcgagcgtgaaagtgtcctgcaaggcttccgggtacaccttctccaactacggcatcacttgggtgcgccaggccccgggacagggcctggaatggatggggtggatttccgcgtacaacggcaatacgaactacgctcagaagttccagggtagagtgaccatgactaggaacacctccatttccaccgcctacatggaactgtcctccctgcggagcgaggacaccgccgtgtactattgcgcccggggaccatactactactacatggatgtctgggggaaggggactatggtcaccgtgtcatccgcctcgggaggcggcggatcaggaggacgcgcctctggtggtggaggatcggagatcgtgatgacccagagccctctctccttgcccgtgactcctggggagcccgcatccatttcatgccggagctcccagtcacttctctactccaacggctataactacgtggattggtacctccaaaagccgggccagagcccgcagctgctgatctacctgggctcgaacagggccagcggagtgcctgaccggttctccgggtcgggaagcgggaccgacttcaagctgcaaatctcgagagtggaggccgaggacgtgggaatctactactgtatgcagggccgccagtttccgtactcgttcggacagggcaccaaagtggaaatcaagaccactaccccagcaccgaggccacccaccccggctcctaccatcgcctcccagcctctgtccctgcgtccggaggcatgtagacccgcagctggtggggccgtgcatacccggggtcttgacttcgcctgcgatatctacatttgggcccctctggctggtacttgcggggtcctgctgctttcactcgtgatcactctttactgtaagcgcggtcggaagaagctgctgtacatctttaagcaacccttcatgaggcctgtgcagactactcaagaggaggacggctgttcatgccggttcccagaggaggaggaaggcggctgcgaactgcgcgtgaaattcagccgcagcgcagatgctccagcctacaagcaggggcagaaccagctctacaacgaactcaatcttggtcggagagaggagtacgacgtgctggacaagcggagaggacgggacccagaaatgggcgggaagccgcgcagaaagaatccccaagagggcctgtacaacgagctccaaaaggataagatggcagaagcctatagcgagattggtatgaaaggggaacgcagaagaggcaaaggccacgacggactgtaccagggactcagcaccgccaccaaggacacctatgacgctcttcacatgcaggccctgccgcctcgg

SEQ ID NO: 970 - DNA, 1446 bp, Artificial Sequence
  source: /note="Description of Artificial Sequence: Synthetic polynucleotide"
atggccctccctgtcaccgccctgctgcttccgctggctcttctgctccacgccgctcggcccgaagtgcaattgctcgaaactggaggaggtctggtgcaacctggaggatcacttcgcctgtcctgcgccgtgtcgggctttgccctgtccaaccatggaatgagctgggtccgccgcgcgccggggaagggcctcgaatgggtgtccggcatcgtctactccggctccacctactacgccgcgtccgtgaagggccggttcacgatttcacgggacaactcgcggaacaccctgtacctccaaatgaattcccttcggccggaggatactgccatctactactgctccgcccacggtggcgaatccgacgtctggggccagggaaccaccgtgaccgtgtccagcgcgtccgggggaggaggaagcgggggtagagcatcgggtggaggcggatcagagatcgtgctgacccagtcccccgccaccttgagcgtgtcaccaggagagtccgccaccctgtcatgccgcgccagccagtccgtgtcctccaacctggcttggtaccagcagaagccggggcaggcccctagactcctgatctatggggcgtcgacccgggcatctggaattcccgataggttcagcggatcgggctcgggcactgacttcactctgaccatctcctcgctgcaagccgaggacgtggctgtgtactactgtcagcagtacggaagctccctgactttcggtggcgggaccaaagtcgagattaagaccactaccccagcaccgaggccacccaccccggctcctaccatcgcctcccagcctctgtccctgcgtccggaggcatgtagacccgcagctggtggggccgtgcatacccggggtcttgacttcgcctgcgatatctacatttgggcccctctggctggtacttgcggggtcctgctgctttcactcgtgatcactctttactgtaagcgcggtcggaagaagctgctgtacatctttaagcaacccttcatgaggcctgtgcagactactcaagaggaggacggctgttcatgccggttcccagaggaggaggaaggcggctgcgaactgcgcgtgaaattcagccgcagcgcagatgctccagcctacaagcaggggcagaaccagctctacaacgaactcaatcttggtcggagagaggagtacgacgtgctggacaagcggagaggacgggacccagaaatgggcgggaagccgcgcagaaagaatccccaagagggcctgtacaacgagctccaaaaggataagatggcagaagcctatagcgagattggtatgaaaggggaacgcagaagaggcaaaggccacgacggactgtaccagggactcagcaccgccaccaaggacacctatgacgctcttcacatgcaggccctgccgcctcgg

SEQ ID NO: 971 - DNA, 1449 bp, Artificial Sequence
  source: /note="Description of Artificial Sequence: Synthetic polynucleotide"
atggccctccctgtcaccgccctgctgcttccgctggctcttctgctccacgccgctcggcccgaagtgcaattggtggaaactggaggaggacttgtgcaacctggaggatcattgagactgagctgcgcagtgtcgggattcgccctgagcaaccatggaatgtcctgggtcagaagggcccctggaaaaggcctcgaatgggtgtcagggatcgtgtactccggttccacttactacgccgcctccgtgaaggggcgcttcactatctcacgggataactcccgcaataccctgtacctccaaatgaacagcctgcggccggaggataccgccatctactactgttccgcccacggtggagagtctgacgtctggggccagggaactaccgtgaccgtgtcctccgcgtccggcggtggagggagcggcggccgcgccagcggcggcggaggctccgagatcgtgatgacccagagccccgctactctgtcggtgtcgcccggagaaagggcgaccctgtcctgccgggcgtcgcagtccgtgagcagcaagctggcttggtaccagcagaagccgggccaggcaccacgcctgcttatgtacggtgcctccattcgggccaccggaatcccggaccggttctcggggtcggggtccggtaccgagttcacactgaccatttcctcgctcgagcccgaggactttgccgtctattactgccagcagtacggctcctcctcatggacgttcggccaggggaccaaggtcgaaatcaagaccactaccccagcaccgaggccacccaccccggctcctaccatcgcctcccagcctctgtccctgcgtccggaggcatgtagacccgcagctggtggggccgtgcatacccggggtcttgacttcgcctgcgatatctacatttgggcccctctggctggtacttgcggggtcctgctgctttcactcgtgatcactctttactgtaagcgcggtcggaagaagctgctgtacatctttaagcaacccttcatgaggcctgtgcagactactcaagaggaggacggctgttcatgccggttcccagaggaggaggaaggcggctgcgaactgcgcgtgaaattcagccgcagcgcagatgctccagcctacaagcaggggcagaaccagctctacaacgaactcaatcttggtcggagagaggagtacgacgtgctggacaagcggagaggacgggacccagaaatgggcgggaagccgcgcagaaagaatccccaagagggcctgtacaacgagctccaaaaggataagatggcagaagcctatagcgagattggtatgaaaggggaacgcagaagaggcaaaggccacgacggactgtaccagggactcagcaccgccaccaaggacacctatgacgctcttcacatgcaggccctgccgcctcgg

SEQ ID NO: 972 - DNA, 1455 bp, Artificial Sequence
  source: /note="Description of Artificial Sequence: Synthetic polynucleotide"
atggccctccctgtcaccgccctgctgcttccgctggctcttctgctccacgccgctcggcccgaagtgcaattggtggagactggaggaggagtggtgcaacctggaggaagcctgagactgtcatgcgcggtgtcgggcttcgccctctccaaccacggaatgtcctgggtccgccgggcccctgggaaaggacttgaatgggtgtccggcatcgtgtactcgggttccacctactacgcggcctcagtgaagggccggtttactattagccgcgacaactccagaaacacactgtacctccaaatgaactcgctgcggccggaagataccgctatctactactgctccgcccatgggggagagtcggacgtctggggacagggcaccactgtcactgtgtccagcgcttccggcggtggtggaagcgggggacgggcctcaggaggcggtggcagcgagattgtgctgacccagtcccccgggaccctgagcctgtccccgggagaaagggccaccctctcctgtcgggcatcccagtccgtggggtctactaaccttgcatggtaccagcagaagcccggccaggcccctcgcctgctgatctacgacgcgtccaatagagccaccggcatcccggatcgcttcagcggaggcggatcgggcaccgacttcaccctcaccatttcaaggctggaaccggaggacttcgccgtgtactactgccagcagtatggttcgtccccaccctggacgttcggccaggggactaaggtcgagatcaagaccactaccccagcaccgaggccacccaccccggctcctaccatcgcctcccagcctctgtccctgcgtccggaggcatgtagacccgcagctggtggggccgtgcatacccggggtcttgacttcgcctgcgatatctacatttgggcccctctggctggtacttgcggggtcctgctgctttcactcgtgatcactctttactgtaagcgcggtcggaagaagctgctgtacatctttaagcaacccttcatgaggcctgtgcagactactcaagaggaggacggctgttcatgccggttcccagaggaggaggaaggcggctgcgaactgcgcgtgaaattcagccgcagcgcagatgctccagcctacaagcaggggcagaaccagctctacaacgaactcaatcttggtcggagagaggagtacgacgtgctggacaagcggagaggacgggacccagaaatgggcgggaagccgcgcagaaagaatccccaagagggcctgtacaacgagctccaaaaggataagatggcagaagcctatagcgagattggtatgaaaggggaacgcagaagaggcaaaggccacgacggactgtaccagggactcagcaccgccaccaaggacacctatgacgctcttcacatgcaggccctgccgcctcgg

SEQ ID NO: 973 - DNA, 1449 bp, Artificial Sequence
  source: /note="Description of Artificial Sequence: Synthetic polynucleotide"
atggccctccctgtcaccgccctgctgcttccgctggctcttctgctccacgccgctcggccccaagtgcaactcgtggaatctggtggaggactcgtgaaacctggaggatcattgagactgtcatgcgcggcctcgggattcacgttctccgattactacatgagctggattcgccaggctccggggaagggactggaatgggtgtcctacatttcctcatccggctccaccatctactacgcggactccgtgaaggggagattcaccattagccgcgataacgccaagaacagcctgtaccttcagatgaactccctgcgggctgaagatactgccgtctactactgcgcaagggagagcggagatgggatggacgtctggggacagggtaccactgtgaccgtgtcgtcggcctccggcggagggggttcgggtggaagggccagcggcggcggaggcagcgacatccagatgacccagtccccctcatcgctgtccgcctccgtgggcgaccgcgtcaccatcacatgccgggcctcacagtcgatctcctcctacctcaattggtatcagcagaagcccggaaaggcccctaagcttctgatctacgcagcgtcctccctgcaatccggggtcccatctcggttctccggctcgggcagcggtaccgacttcactctgaccatctcgagcctgcagccggaggacttcgccacttactactgtcagcaaagctacaccctcgcgtttggccagggcaccaaagtggacatcaagaccactaccccagcaccgaggccacccaccccggctcctaccatcgcctcccagcctctgtccctgcgtccggaggcatgtagacccgcagctggtggggccgtgcatacccggggtcttgacttcgcctgcgatatctacatttgggcccctctggctggtacttgcggggtcctgctgctttcactcgtgatcactctttactgtaagcgcggtcggaagaagctgctgtacatctttaagcaacccttcatgaggcctgtgcagactactcaagaggaggacggctgttcatgccggttcccagaggaggaggaaggcggctgcgaactgcgcgtgaaattcagccgcagcgcagatgctccagcctacaagcaggggcagaaccagctctacaacgaactcaatcttggtcggagagaggagtacgacgtgctggacaagcggagaggacgggacccagaaatgggcgggaagccgcgcagaaagaatccccaagagggcctgtacaacgagctccaaaaggataagatggcagaagcctatagcgagattggtatgaaaggggaacgcagaagaggcaaaggccacgacggactgtaccagggactcagcaccgccaccaaggacacctatgacgctcttcacatgcaggccctgccgcctcgg

SEQ ID NO: 974 - DNA, 1449 bp, Artificial Sequence
  source: /note="Description of Artificial Sequence: Synthetic polynucleotide"
atggccctccctgtcaccgccctgctgcttccgctggctcttctgctccacgccgctcggcccgaagtgcaattggtggaatcagggggaggacttgtgcagcctggaggatcgctgagactgtcatgtgccgtgtccggctttgccctgtccaaccacgggatgtcctgggtccgccgcgcgcctggaaagggcctcgaatgggtgtcgggtattgtgtacagcggtagcacctactatgccgcatccgtgaaggggagattcaccatcagccgggacaactccaggaacactctgtacctccaaatgaattcgctgaggccagaggacactgccatctactactgctccgcgcatggcggagagtccgacgtctggggacaggggaccaccgtgaccgtgtctagcgcgtccggcggaggcggcagcgggggtcgggcatcagggggcggcggatcggacatccagctcacccagtccccgagctcgctgtccgcctccgtgggagatcgggtcaccatcacgtgccgcgccagccagtcgatttcctcctacctgaactggtaccaacagaagcccggaaaagccccgaagcttctcatctacgccgcctcgagcctgcagtcaggagtgccctcacggttctccggctccggttccggtactgatttcaccctgaccatttcctccctgcaaccggaggacttcgctacttactactgccagcagtcgtactccaccccctacactttcggacaaggcaccaaggtcgaaatcaagaccactaccccagcaccgaggccacccaccccggctcctaccatcgcctcccagcctctgtccctgcgtccggaggcatgtagacccgcagctggtggggccgtgcatacccggggtcttgacttcgcctgcgatatctacatttgggcccctctggctggtacttgcggggtcctgctgctttcactcgtgatcactctttactgtaagcgcggtcggaagaagctgctgtacatctttaagcaacccttcatgaggcctgtgcagactactcaagaggaggacggctgttcatgccggttcccagaggaggaggaaggcggctgcgaactgcgcgtgaaattcagccgcagcgcagatgctccagcctacaagcaggggcagaaccagctctacaacgaactcaatcttggtcggagagaggagtacgacgtgctggacaagcggagaggacgggacccagaaatgggcgggaagccgcgcagaaagaatccccaagagggcctgtacaacgagctccaaaaggataagatggcagaagcctatagcgagattggtatgaaaggggaacgcagaagaggcaaaggccacgacggactgtaccagggactcagcaccgccaccaaggacacctatgacgctcttcacatgcaggccctgccgcctcgg

SEQ ID NO: 975 - DNA, 1470 bp, Artificial Sequence
  source: /note="Description of Artificial Sequence: Synthetic polynucleotide"
atggccctccctgtcaccgccctgctgcttccgctggctcttctgctccacgccgctcggccccaagtgcaactggtgcaaagcggaggaggattggtcaaacccggaggaagcctgagactgtcatgcgcggcctctggattcaccttctccgattactacatgtcatggatcagacaggccccggggaagggcctcgaatgggtgtcctacatctcgtcctccgggaacaccatctactacgccgacagcgtgaagggccgctttaccatttcccgcgacaacgcaaagaactcgctgtaccttcagatgaattccctgcgggctgaagataccgcggtgtactattgcgcccggtccactatggtccgggaggactactggggacagggcacactcgtgaccgtgtccagcgcgagcgggggtggaggcagcggtggacgcgcctccggcggcggcggttcagacatcgtgctgactcagtcgcccctgtcgctgccggtcaccctgggccaaccggcctcaattagctgcaagtcctcggagagcctggtgcacaactcaggaaagacttacctgaactggttccatcagcggcctggacagtccccacggaggctcatctatgaagtgtccaacagggattcgggggtgcccgaccgcttcactggctccgggtccggcaccgacttcaccttgaaaatctccagagtggaagccgaggacgtgggcgtgtactactgtatgcagggtacccactggcctggaacctttggacaaggaactaagctcgagattaagaccactaccccagcaccgaggccacccaccccggctcctaccatcgcctcccagcctctgtccctgcgtccggaggcatgtagacccgcagctggtggggccgtgcatacccggggtcttgacttcgcctgcgatatctacatttgggcccctctggctggtacttgcggggtcctgctgctttcactcgtgatcactctttactgtaagcgcggtcggaagaagctgctgtacatctttaagcaacccttcatgaggcctgtgcagactactcaagaggaggacggctgttcatgccggttcccagaggaggaggaaggcggctgcgaactgcgcgtgaaattcagccgcagcgcagatgctccagcctacaagcaggggcagaaccagctctacaacgaactcaatcttggtcggagagaggagtacgacgtgctggacaagcggagaggacgggacccagaaatgggcgggaagccgcgcagaaagaatccccaagagggcctgtacaacgagctccaaaaggataagatggcagaagcctatagcgagattggtatgaaaggggaacgcagaagaggcaaaggccacgacggactgtaccagggactcagcaccgccaccaaggacacctatgacgctcttcacatgcaggccctgccgcctcgg

SEQ ID NO: 976 - DNA, 1449 bp, Artificial Sequence
  source: /note="Description of Artificial Sequence: Synthetic polynucleotide"
atggccctccctgtcaccgccctgctgcttccgctggctcttctgctccacgccgctcggccccaagtgcaactcgtggaatctggtggaggactcgtgcaacccggtggaagccttaggctgtcgtgcgccgtcagcgggtttgctctgagcaaccatggaatgtcctgggtccgccgggcaccgggaaaagggctggaatgggtgtccggcatcgtgtacagcgggtcaacctattacgccgcgtccgtgaagggcagattcactatctcaagagacaacagccggaacaccctgtacttgcaaatgaattccctgcgccccgaggacaccgccatctactactgctccgcccacggaggagagtcggacgtgtggggccagggaacgactgtgactgtgtccagcgcatcaggagggggtggttcgggcggccgggcctcggggggaggaggttccgacattcggctgacccagtccccgtccccactgtcggcctccgtcggcgaccgcgtgaccatcacttgtcaggcgtccgaggacattaacaagttcctgaactggtaccaccagacccctggaaaggcccccaagctgctgatctacgatgcctcgacccttcaaactggagtgcctagccggttctccgggtccggctccggcactgatttcactctgaccatcaactcattgcagccggaagatatcgggacctactattgccagcagtacgaatccctcccgctcacattcggcgggggaaccaaggtcgagattaagaccactaccccagcaccgaggccacccaccccggctcctaccatcgcctcccagcctctgtccctgcgtccggaggcatgtagacccgcagctggtggggccgtgcatacccggggtcttgacttcgcctgcgatatctacatttgggcccctctggctggtacttgcggggtcctgctgctttcactcgtgatcactctttactgtaagcgcggtcggaagaagctgctgtacatctttaagcaacccttcatgaggcctgtgcagactactcaagaggaggacggctgttcatgccggttcccagaggaggaggaaggcggctgcgaactgcgcgtgaaattcagccgcagcgcagatgctccagcctacaagcaggggcagaaccagctctacaacgaactcaatcttggtcggagagaggagtacgacgtgctggacaagcggagaggacgggacccagaaatgggcgggaagccgcgcagaaagaatccccaagagggcctgtacaacgagctccaaaaggataagatggcagaagcctatagcgagattggtatgaaaggggaacgcagaagaggcaaaggccacgacggactgtaccagggactcagcaccgccaccaaggacacctatgacgctcttcacatgcaggccctgccgcctcgg

SEQ ID NO: 977 - DNA, 1452 bp, Artificial Sequence
  source: /note="Description of Artificial Sequence: Synthetic polynucleotide"
atggccctccctgtcaccgccctgctgcttccgctggctcttctgctccacgccgctcggcccgaagtgcaattggtggaaactggaggaggacttgtgcaacctggaggatcattgcggctctcatgcgctgtctccggcttcgccctgtcaaatcacgggatgtcgtgggtcagacgggccccgggaaagggtctggaatgggtgtcggggattgtgtacagcggctccacctactacgccgcttcggtcaagggccgcttcactatttcacgggacaacagccgcaacaccctctatctgcaaatgaactctctccgcccggaggataccgccatctactactgctccgcacacggcggcgaatccgacgtgtggggacagggaaccactgtcaccgtgtcgtccgcatccggtggcggaggatcgggtggccgggcctccgggggcggcggcagcgagactaccctgacccagtcccctgccactctgtccgtgagcccgggagagagagccacccttagctgccgggccagccagagcgtgggctccaacctggcctggtaccagcagaagccaggacagggtcccaggctgctgatctacggagcctccactcgcgcgaccggcatccccgcgaggttctccgggtcgggttccgggaccgagttcaccctgaccatctcctccctccaaccggaggacttcgcggtgtactactgtcagcagtacaacgattggctgcccgtgacatttggacaggggacgaaggtggaaatcaaaaccactaccccagcaccgaggccacccaccccggctcctaccatcgcctcccagcctctgtccctgcgtccggaggcatgtagacccgcagctggtggggccgtgcatacccggggtcttgacttcgcctgcgatatctacatttgggcccctctggctggtacttgcggggtcctgctgctttcactcgtgatcactctttactgtaagcgcggtcggaagaagctgctgtacatctttaagcaacccttcatgaggcctgtgcagactactcaagaggaggacggctgttcatgccggttcccagaggaggaggaaggcggctgcgaactgcgcgtgaaattcagccgcagcgcagatgctccagcctacaagcaggggcagaaccagctctacaacgaactcaatcttggtcggagagaggagtacgacgtgctggacaagcggagaggacgggacccagaaatgggcgggaagccgcgcagaaagaatccccaagagggcctgtacaacgagctccaaaaggataagatggcagaagcctatagcgagattggtatgaaaggggaacgcagaagaggcaaaggccacgacggactgtaccagggactcagcaccgccaccaaggacacctatgacgctcttcacatgcaggccctgccgcctcgg

SEQ ID NO: 978 - DNA, 1455 bp, Artificial Sequence
  source: /note="Description of Artificial Sequence: Synthetic polynucleotide"
atggccctccctgtcaccgccctgctgcttccgctggctcttctgctccacgccgctcggcccgaagtgcaattggtggaatctggtggaggacttgtgcaacctggaggatcactgagactgtcatgcgcggtgtccggttttgccctgagcaatcatgggatgtcgtgggtccggcgcgcccccggaaagggtctggaatgggtgtcgggtatcgtctactccgggagcacttactacgccgcgagcgtgaagggccgcttcaccatttcccgcgataactcccgcaacaccctgtacttgcaaatgaactcgctccggcctgaggacactgccatctactactgctccgcacacggaggagaatccgacgtgtggggccagggaactaccgtgaccgtcagcagcgcctccggcggcgggggctcaggcggacgggctagcggcggcggtggctccgagatcgtgctgacccagtcgcctggcactctctcgctgagccccggggaaagggcaaccctgtcctgtcgggccagccagtccattggatcatcctccctcgcctggtatcagcagaaaccgggacaggctccgcggctgcttatgtatggggccagctcaagagcctccggcattcccgaccggttctccgggtccggttccggcaccgatttcaccctgactatctcgaggctggagccagaggacttcgccgtgtactactgccagcagtacgcggggtccccgccgttcacgttcggacagggaaccaaggtcgagatcaagaccactaccccagcaccgaggccacccaccccggctcctaccatcgcctcccagcctctgtccctgcgtccggaggcatgtagacccgcagctggtggggccgtgcatacccggggtcttgacttcgcctgcgatatctacatttgggcccctctggctggtacttgcggggtcctgctgctttcactcgtgatcactctttactgtaagcgcggtcggaagaagctgctgtacatctttaagcaacccttcatgaggcctgtgcagactactcaagaggaggacggctgttcatgccggttcccagaggaggaggaaggcggctgcgaactgcgcgtgaaattcagccgcagcgcagatgctccagcctacaagcaggggcagaaccagctctacaacgaactcaatcttggtcggagagaggagtacgacgtgctggacaagcggagaggacgggacccagaaatgggcgggaagccgcgcagaaagaatccccaagagggcctgtacaacgagctccaaaaggataagatggcagaagcctatagcgagattggtatgaaaggggaacgcagaagaggcaaaggccacgacggactgtaccagggactcagcaccgccaccaaggacacctatgacgctcttcacatgcaggccctgccgcctcgg

SEQ ID NO: 979 - protein, 487 aa, Artificial Sequence
  source: /note="Description of Artificial Sequence: Synthetic polypeptide"
MALPVTALLLPLALLLHAARPQVQLQESGPGLVKPSETLSLTCTVSGGSISSSYYYWGWIRQPPGKGLEWIGSIYYSGSAYYNPSLKSRVTISVDTSKNQFSLRLSSVTAADTAVYYCARHWQEWPDAFDIWGQGTMVTVSSGGGGSGGGGSGGGGSETTLTQSPAFMSATPGDKVIISCKASQDIDDAMNWYQQKPGEAPLFIIQSATSPVPGIPPRFSGSGFGTDFSLTINNIESEDAAYYFCLQHDNFPLTFGQGTKLEIKTTTPAPRPPTPAPTIASQPLSLRPEACRPAAGGAVHTRGLDFACDIYIWAPLAGTCGVLLLSLVITLYCKRGRKKLLYIFKQPFMRPVQTTQEEDGCSCRFPEEEEGGCELRVKFSRSADAPAYKQGQNQLYNELNLGRREEYDVLDKRRGRDPEMGGKPRRKNPQEGLYNELQKDKMAEAYSEIGMKGERRRGKGHDGLYQGLSTATKDTYDALHMQALPPR

SEQ ID NO: 980 - protein, 489 aa, Artificial Sequence
  source: /note="Description of Artificial Sequence: Synthetic polypeptide"
MALPVTALLLPLALLLHAARPQVNLRESGPALVKPTQTLTLTCTFSGFSLRTSGMCVSWIRQPPGKALEWLARIDWDEDKFYSTSLKTRLTISKDTSDNQVVLRMTNMDPADTATYYCARSGAGGTSATAFDIWGPGTMVTVSSGGGGSGGGGSGGGGSDIQMTQSPSSLSASVGDRVTITCRASQDIYNNLAWFQLKPGSAPRSLMYAANKSQSGVPSRFSGSASGTDFTLTISSLQPEDFATYYCQHYYRFPYSFGQGTKLEIKTTTPAPRPPTPAPTIASQPLSLRPEACRPAAGGAVHTRGLDFACDIYIWAPLAGTCGVLLLSLVITLYCKRGRKKLLYIFKQPFMRPVQTTQEEDGCSCRFPEEEEGGCELRVKFSRSADAPAYKQGQNQLYNELNLGRREEYDVLDKRRGRDPEMGGKPRRKNPQEGLYNELQKDKMAEAYSEIGMKGERRRGKGHDGLYQGLSTATKDTYDALHMQALPPR

SEQ ID NO: 981 - protein, 490 aa, Artificial Sequence
  source: /note="Description of Artificial Sequence: Synthetic polypeptide"
MALPVTALLLPLALLLHAARPEVQLVESGGGLVKPGGSLRLSCAASGFTFSSYSMNWVRQAPGKGLEWVSSISSSSSYIYYADSVKGRFTISRDNAKNSLYLQMNSLRAEDTAVYYCAKTIAAVYAFDIWGQGTTVTVSSGGGGSGGGGSGGGGSEIVLTQSPLSLPVTPEEPASISCRSSQSLLHSNGYNYLDWYLQKPGQSPQLLIYLGSNRASGVPDRFSGSGSGTDFTLKISRVEAEDVGVYYCMQALQTPYTFGQGTKLEIKTTTPAPRPPTPAPTIASQPLSLRPEACRPAAGGAVHTRGLDFACDIYIWAPLAGTCGVLLLSLVITLYCKRGRKKLLYIFKQPFMRPVQTTQEEDGCSCRFPEEEEGGCELRVKFSRSADAPAYKQGQNQLYNELNLGRREEYDVLDKRRGRDPEMGGKPRRKNPQEGLYNELQKDKMAEAYSEIGMKGERRRGKGHDGLYQGLSTATKDTYDALHMQALPPR

SEQ ID NO: 982 - protein, 484 aa, Artificial Sequence
  source: /note="Description of Artificial Sequence: Synthetic polypeptide"
MALPVTALLLPLALLLHAARPEVQLVESGGGLVKPGGSLRLSCAASGFTFSDYYMSWIRQAPGKGLEWVSYISSSGSTIYYADSVKGRFTISRDNAKNSLYLQMNSLRAEDTAVYYCARDLRGAFDIWGQGTMVTVSSGGGGSGGGGSGGGGSSYVLTQSPSVSAAPGYTATISCGGNNIGTKSVHWYQQKPGQAPLLVIRDDSVRPSKIPGRFSGSNSGNMATLTISGVQAGDEADFYCQVWDSDSEHVVFGGGTKLTVLTTTPAPRPPTPAPTIASQPLSLRPEACRPAAGGAVHTRGLDFACDIYIWAPLAGTCGVLLLSLVITLYCKRGRKKLLYIFKQPFMRPVQTTQEEDGCSCRFPEEEEGGCELRVKFSRSADAPAYKQGQNQLYNELNLGRREEYDVLDKRRGRDPEMGGKPRRKNPQEGLYNELQKDKMAEAYSEIGMKGERRRGKGHDGLYQGLSTATKDTYDALHMQALPPR

SEQ ID NO: 983 - protein, 485 aa, Artificial Sequence
  source: /note="Description of Artificial Sequence: Synthetic polypeptide"
MALPVTALLLPLALLLHAARPQVQLVQSGAEVKKPGASVKVSCKPSGYTVTSHYIHWVRRAPGQGLEWMGMINPSGGVTAYSQTLQGRVTMTSDTSSSTVYMELSSLRSEDTAMYYCAREGSGSGWYFDFWGRGTLVTVSSGGGGSGGGGSGGGGSSYVLTQPPSVSVSPGQTASITCSGDGLSKKYVSWYQQKAGQSPVVLISRDKERPSGIPDRFSGSNSADTATLTISGTQAMDEADYYCQAWDDTTVVFGGGTKLTVLTTTPAPRPPTPAPTIASQPLSLRPEACRPAAGGAVHTRGLDFACDIYIWAPLAGTCGVLLLSLVITLYCKRGRKKLLYIFKQPFMRPVQTTQEEDGCSCRFPEEEEGGCELRVKFSRSADAPAYKQGQNQLYNELNLGRREEYDVLDKRRGRDPEMGGKPRRKNPQEGLYNELQKDKMAEAYSEIGMKGERRRGKGHDGLYQGLSTATKDTYDALHMQALPPR

SEQ ID NO: 984 - protein, 489 aa, Artificial Sequence
  source: /note="Description of Artificial Sequence: Synthetic polypeptide"
MALPVTALLLPLALLLHAARPQVQLQESGPGLVKPSQTLSLTCTVSGGSISSGGYYWSWIRQHPGKGLEWIGYIYYSGSTYYNPSLKSRVTISVDTSKNQFSLKLSSVTAADTAVYYCARAGIAARLRGAFDIWGQGTMVTVSSGGGGSGGGGSGGGGSDIVMTQSPSSVSASVGDRVIITCRASQGIRNWLAWYQQKPGKAPNLLIYAASNLQSGVPSRFSGSGSGADFTLTISSLQPEDVATYYCQKYNSAPFTFGPGTKVDIKTTTPAPRPPTPAPTIASQPLSLRPEACRPAAGGAVHTRGLDFACDIYIWAPLAGTCGVLLLSLVITLYCKRGRKKLLYIFKQPFMRPVQTTQEEDGCSCRFPEEEEGGCELRVKFSRSADAPAYKQGQNQLYNELNLGRREEYDVLDKRRGRDPEMGGKPRRKNPQEGLYNELQKDKMAEAYSEIGMKGERRRGKGHDGLYQGLSTATKDTYDALHMQALPPR

SEQ ID NO: 985 - protein, 497 aa, Artificial Sequence
  source: /note="Description of Artificial Sequence: Synthetic polypeptide"
MALPVTALLLPLALLLHAARPQVQLVQSGAEVKKPGSSVKVSCKASGGTFSSYAISWVRQAPGQGLEWMGGIIPIFGTANYAQKFQGRVTITADESTSTAYMELSSLRSEDTAVYYCARRGGYQLLRWDVGLLRSAFDIWGQGTMVTVSSGGGGSGGGGSGGGGSSYVLTQPPSVSVAPGQTARITCGGNNIGSKSVHWYQQKPGQAPVLVLYGKNNRPSGVPDRFSGSRSGTTASLTITGAQAEDEADYYCSSRDSSGDHLRVFGTGTKVTVLTTTPAPRPPTPAPTIASQPLSLRPEACRPAAGGAVHTRGLDFACDIYIWAPLAGTCGVLLLSLVITLYCKRGRKKLLYIFKQPFMRPVQTTQEEDGCSCRFPEEEEGGCELRVKFSRSADAPAYKQGQNQLYNELNLGRREEYDVLDKRRGRDPEMGGKPRRKNPQEGLYNELQKDKMAEAYSEIGMKGERRRGKGHDGLYQGLSTATKDTYDALHMQALPPR

SEQ ID NO: 986 - protein, 492 aa, Artificial Sequence
  source: /note="Description of Artificial Sequence: Synthetic polypeptide"
MALPVTALLLPLALLLHAARPEVQLQQSGPGLVKPSQTLSLTCAISGDSVSSNSAAWNWIRQSPSRGLEWLGRTYYRSKWYSFYAISLKSRIIINPDTSKNQFSLQLKSVTPEDTAVYYCARSSPEGLFLYWFDPWGQGTLVTVSSGGDGSGGGGSGGGGSSSELTQDPAVSVALGQTIRITCQGDSLGNYYATWYQQKPGQAPVLVIYGTNNRPSGIPDRFSASSSGNTASLTITGAQAEDEADYYCNSRDSSGHHLLFGTGTKVTVLTTTPAPRPPTPAPTIASQPLSLRPEACRPAAGGAVHTRGLDFACDIYIWAPLAGTCGVLLLSLVITLYCKRGRKKLLYIFKQPFMRPVQTTQEEDGCSCRFPEEEEGGCELRVKFSRSADAPAYKQGQNQLYNELNLGRREEYDVLDKRRGRDPEMGGKPRRKNPQEGLYNELQKDKMAEAYSEIGMKGERRRGKGHDGLYQGLSTATKDTYDALHMQALPPR

SEQ ID NO: 987 - protein, 490 aa, Artificial Sequence
  source: /note="Description of Artificial Sequence: Synthetic polypeptide"
MALPVTALLLPLALLLHAARPEVQLVESGGGLVQPGGSLRLSCAASGFTFSSYAMSWVRQAPGKGLEWVSAISGSGGSTYYADSVKGRFTISRDNSKNTLYLQMNSLRAEDTAVYYCAKVEGSGSLDYWGQGTLVTVSSGGGGSGGGGSGGGGSEIVMTQSPGTLSLSPGERATLSCRASQSVSSAYLAWYQQKPGQPPRLLISGASTRATGIPDRFGGSGSGTDFTLTISRLEPEDFAVYYCQHYGSSFNGSSLFTFGQGTRLEIKTTTPAPRPPTPAPTIASQPLSLRPEACRPAAGGAVHTRGLDFACDIYIWAPLAGTCGVLLLSLVITLYCKRGRKKLLYIFKQPFMRPVQTTQEEDGCSCRFPEEEEGGCELRVKFSRSADAPAYKQGQNQLYNELNLGRREEYDVLDKRRGRDPEMGGKPRRKNPQEGLYNELQKDKMAEAYSEIGMKGERRRGKGHDGLYQGLSTATKDTYDALHMQALPPR

SEQ ID NO: 988 - protein, 485 aa, Artificial Sequence
  source: /note="Description of Artificial Sequence: Synthetic polypeptide"
MALPVTALLLPLALLLHAARPEVQLVETGGGLVQPGGSLRLSCAASGITFSRYPMSWVRQAPGKGLEWVSGISDSGVSTYYADSAKGRFTISRDNSKNTLFLQMSSLRDEDTAVYYCVTRAGSEASDIWGQGTMVTVSSGGGGSGGGGSGGGGSEIVLTQSPATLSLSPGERATLSCRASQSVSNSLAWYQQKPGQAPRLLIYDASSRATGIPDRFSGSGSGTDFTLTISRLEPEDFAIYYCQQFGTSSGLTFGGGTKLEIKTTTPAPRPPTPAPTIASQPLSLRPEACRPAAGGAVHTRGLDFACDIYIWAPLAGTCGVLLLSLVITLYCKRGRKKLLYIFKQPFMRPVQTTQEEDGCSCRFPEEEEGGCELRVKFSRSADAPAYKQGQNQLYNELNLGRREEYDVLDKRRGRDPEMGGKPRRKNPQEGLYNELQKDKMAEAYSEIGMKGERRRGKGHDGLYQGLSTATKDTYDALHMQALPPR

SEQ ID NO: 989 - protein, 492 aa, Artificial Sequence
  source: /note="Description of Artificial Sequence: Synthetic polypeptide"
MALPVTALLLPLALLLHAARPQVQLVESGGGLVQPGGSLRLSCAASGFTFSSYAMSWVRQAPGKGLEWVSAISGSGGSTYYADSVKGRFTISRDNAKNSLYLQMNSLRAEDTAIYYCARATYKRELRYYYGMDVWGQGTMVTVSSGGGGSGGGGSGGGGSEIVMTQSPGTVSLSPGERATLSCRASQSVSSSFLAWYQQKPGQAPRLLIYGASSRATGIPDRFSGSGSGTDFTLTISRLEPEDSAVYYCQQYHSSPSWTFGQGTRLEIKTTTPAPRPPTPAPTIASQPLSLRPEACRPAAGGAVHTRGLDFACDIYIWAPLAGTCGVLLLSLVITLYCKRGRKKLLYIFKQPFMRPVQTTQEEDGCSCRFPEEEEGGCELRVKFSRSADAPAYKQGQNQLYNELNLGRREEYDVLDKRRGRDPEMGGKPRRKNPQEGLYNELQKDKMAEAYSEIGMKGERRRGKGHDGLYQGLSTATKDTYDALHMQALPPR

SEQ ID NO: 990 - protein, 492 aa, Artificial Sequence
  source: /note="Description of Artificial Sequence: Synthetic polypeptide"
MALPVTALLLPLALLLHAARPEVQLVETGGGLVQPGGSLRLSCAASGFTFSSYAMSWVRQAPGKGLEWVSAISGSGGSTYYADSVKGRFTISRDNSKNTLYLQMNTLKAEDTAVYYCARATYKRELRYYYGMDVWGQGTTVTVSSGGGGSGGGGSGGGGSEIVLTQSPSTLSLSPGESATLSCRASQSVSTTFLAWYQQKPGQAPRLLIYGSSNRATGIPDRFSGSGSGTDFTLTIRRLEPEDFAVYYCQQYHSSPSWTFGQGTKVEIKTTTPAPRPPTPAPTIASQPLSLRPEACRPAAGGAVHTRGLDFACDIYIWAPLAGTCGVLLLSLVITLYCKRGRKKLLYIFKQPFMRPVQTTQEEDGCSCRFPEEEEGGCELRVKFSRSADAPAYKQGQNQLYNELNLGRREEYDVLDKRRGRDPEMGGKPRRKNPQEGLYNELQKDKMAEAYSEIGMKGERRRGKGHDGLYQGLSTATKDTYDALHMQALPPR

SEQ ID NO: 991 - protein, 483 aa, Artificial Sequence
  source: /note="Description of Artificial Sequence: Synthetic polypeptide"
MALPVTALLLPLALLLHAARPEVQLVETGGGLVQPGRSLRLSCAASGFTFDDYAMHWVRQAPGKGLEWVSGISWNSGSIGYADSVKGRFTISRDNAKNSLYLQMNSLRDEDTAVYYCARVGKAVPDVWGQGTTVTVSSGGGGSGGGGSGGGGSDIVMTQTPSSLSASVGDRVTITCRASQSISSYLNWYQQKPGKAPKLLIYAASSLQSGVPSRFSGSGSGTDFTLTISSLQPEDFATYYCQQSYSTPYSFGQGTRLEIKTTTPAPRPPTPAPTIASQPLSLRPEACRPAAGGAVHTRGLDFACDIYIWAPLAGTCGVLLLSLVITLYCKRGRKKLLYIFKQPFMRPVQTTQEEDGCSCRFPEEEEGGCELRVKFSRSADAPAYKQGQNQLYNELNLGRREEYDVLDKRRGRDPEMGGKPRRKNPQEGLYNELQKDKMAEAYSEIGMKGERRRGKGHDGLYQGLSTATKDTYDALHMQALPPR

SEQ ID NO: 992 - protein, 490 aa, Artificial Sequence
  source: /note="Description of Artificial Sequence: Synthetic polypeptide"
MALPVTALLLPLALLLHAARPEVQLVESGGGLVQPGRSLRLSCTASGFTFDDYAMHWVRQRPGKGLEWVASINWKGNSLAYGDSVKGRFAISRDNAKNTVFLQMNSLRTEDTAVYYCASHQGVAYYNYAMDVWGRGTLVTVSSGGGGSGGGGSGGGGSEIVLTQSPGTLSLSPGERATLSCRATQSIGSSFLAWYQQRPGQAPRLLIYGASQRATGIPDRFSGRGSGTDFTLTISRVEPEDSAVYYCQHYESSPSWTFGQGTKVEIKTTTPAPRPPTPAPTIASQPLSLRPEACRPAAGGAVHTRGLDFACDIYIWAPLAGTCGVLLLSLVITLYCKRGRKKLLYIFKQPFMRPVQTTQEEDGCSCRFPEEEEGGCELRVKFSRSADAPAYKQGQNQLYNELNLGRREEYDVLDKRRGRDPEMGGKPRRKNPQEGLYNELQKDKMAEAYSEIGMKGERRRGKGHDGLYQGLSTATKDTYDALHMQALPPR

SEQ ID NO: 993 - protein, 485 aa, Artificial Sequence
  source: /note="Description of Artificial Sequence: Synthetic polypeptide"
MALPVTALLLPLALLLHAARPEVQLVESGGGLVQPGGSLRLSCAASGFTFSSYAMSWVRQAPGKGLEWVSAISGSGGSTYYADSVKGRFTISRDNSKNTLYLQMNSLRAEDTAVYYCAKVVRDGMDVWGQGTTVTVSSGGGGSGGGGSGGGGSEIVLTQSPATLSLSPGERATLSCRASQSVSSSYLAWYQQKPGQAPRLLIYGASSRATGIPDRFSGNGSGTDFTLTISRLEPEDFAVYYCQQYGSPPRFTFGPGTKVDIKTTTPAPRPPTPAPTIASQPLSLRPEACRPAAGGAVHTRGLDFACDIYIWAPLAGTCGVLLLSLVITLYCKRGRKKLLYIFKQPFMRPVQTTQEEDGCSCRFPEEEEGGCELRVKFSRSADAPAYKQGQNQLYNELNLGRREEYDVLDKRRGRDPEMGGKPRRKNPQEGLYNELQKDKMAEAYSEIGMKGERRRGKGHDGLYQGLSTATKDTYDALHMQALPPR

SEQ ID NO: 994 - protein, 486 aa, Artificial Sequence
  source: /note="Description of Artificial Sequence: Synthetic polypeptide"
MALPVTALLLPLALLLHAARPEVQLLESGGGLVQPGGSLRLSCAASGFTFSSYAMSWVRQAPGKGLEWVSAISGSGGSTYYADSVKGRFTISRDNSKNTLYLQMNSLRAEDTAVYYCAKIPQTGTFDYWGQGTLVTVSSGGGGSGGGGSGGGGSEIVLTQSPGTLSLSPGERATLSCRASQSVSSSYLAWYQQRPGQAPRLLIYGASSRATGIPDRFSGSGSGTDFTLTISRLEPEDFAVYYCQHYGSSPSWTFGQGTRLEIKTTTPAPRPPTPAPTIASQPLSLRPEACRPAAGGAVHTRGLDFACDIYIWAPLAGTCGVLLLSLVITLYCKRGRKKLLYIFKQPFMRPVQTTQEEDGCSCRFPEEEEGGCELRVKFSRSADAPAYKQGQNQLYNELNLGRREEYDVLDKRRGRDPEMGGKPRRKNPQEGLYNELQKDKMAEAYSEIGMKGERRRGKGHDGLYQGLSTATKDTYDALHMQALPPR

SEQ ID NO: 995 - protein, 492 aa, Artificial Sequence
  source: /note="Description of Artificial Sequence: Synthetic polypeptide"
MALPVTALLLPLALLLHAARPEVQLVETGGGLVQPGGSLRLSCAASGFTFSSYAMSWVRQAPGKGLEWVSAISGSGGSTYYADSVKGRFTMSRENDKNSVFLQMNSLRVEDTGVYYCARANYKRELRYYYGMDVWGQGTMVTVSSGGGGSGGGGSGGGGSEIVMTQSPGTLSLSPGESATLSCRASQRVASNYLAWYQHKPGQAPSLLISGASSRATGVPDRFSGSGSGTDFTLAISRLEPEDSAVYYCQHYDSSPSWTFGQGTKVEIKTTTPAPRPPTPAPTIASQPLSLRPEACRPAAGGAVHTRGLDFACDIYIWAPLAGTCGVLLLSLVITLYCKRGRKKLLYIFKQPFMRPVQTTQEEDGCSCRFPEEEEGGCELRVKFSRSADAPAYKQGQNQLYNELNLGRREEYDVLDKRRGRDPEMGGKPRRKNPQEGLYNELQKDKMAEAYSEIGMKGERRRGKGHDGLYQGLSTATKDTYDALHMQALPPR

SEQ ID NO: 996 - protein, 488 aa, Artificial Sequence
  source: /note="Description of Artificial Sequence: Synthetic polypeptide"
MALPVTALLLPLALLLHAARPEVQLLETGGGLVQPGGSLRLSCAASGFSFSSYAMSWVRQAPGKGLEWVSAISGSGGSTYYADSVKGRFTISRDNSKNTLYLQMNSLRAEDTAVYYCAKALVGATGAFDIWGQGTLVTVSSGGGGSGGGGSGGGGSEIVLTQSPGTLSLSPGERATLSCRASQSLSSNFLAWYQQKPGQAPGLLIYGASNWATGTPDRFSGSGSGTDFTLTITRLEPEDFAVYYCQYYGTSPMYTFGQGTKVEIKTTTPAPRPPTPAPTIASQPLSLRPEACRPAAGGAVHTRGLDFACDIYIWAPLAGTCGVLLLSLVITLYCKRGRKKLLYIFKQPFMRPVQTTQEEDGCSCRFPEEEEGGCELRVKFSRSADAPAYKQGQNQLYNELNLGRREEYDVLDKRRGRDPEMGGKPRRKNPQEGLYNELQKDKMAEAYSEIGMKGERRRGKGHDGLYQGLSTATKDTYDALHMQALPPR

SEQ ID NO: 997 - protein, 488 aa, Artificial Sequence
  source: /note="Description of Artificial Sequence: Synthetic polypeptide"
MALPVTALLLPLALLLHAARPEVQLLESGGGLVQPGGSLRLSCAASGFTFSSYAMSWVRQAPGKGLEWVSAISGSGGSTYYADSVKGRFTISRDNSKNTLYLQMNSLRAEDTAVYYCVLWFGEGFDPWGQGTLVTVSSGGGGSGGGGSGGGGSDIVLTQSPLSLPVTPGEPASISCRSSQSLLHSNGYNYLDWYLQKPGQSPQLLIYLGSNRASGVPDRFSGSGSGTDFTLKISRVEAEDVGVYYCMQALQTPLTFGGGTKVDIKTTTPAPRPPTPAPTIASQPLSLRPEACRPAAGGAVHTRGLDFACDIYIWAPLAGTCGVLLLSLVITLYCKRGRKKLLYIFKQPFMRPVQTTQEEDGCSCRFPEEEEGGCELRVKFSRSADAPAYKQGQNQLYNELNLGRREEYDVLDKRRGRDPEMGGKPRRKNPQEGLYNELQKDKMAEAYSEIGMKGERRRGKGHDGLYQGLSTATKDTYDALHMQALPPR

SEQ ID NO: 998 - protein, 495 aa, Artificial Sequence
  source: /note="Description of Artificial Sequence: Synthetic polypeptide"
MALPVTALLLPLALLLHAARPQVQLVESGGGLVQPGGSLRLSCAASGFTFSSYAMSWVRQAPGKGLEWVSAISGSGGSTYYADSVKGRFTISRDNSKNTLYLQMNSLRAEDTAVYYCAKVGYDSSGYYRDYYGMDVWGQGTTVTVSSGGGGSGGGGSGGGGSEIVLTQSPGTLSLSPGERATLSCRASQSVSSSYLAWYQQKPGQAPRLLIYGTSSRATGISDRFSGSGSGTDFTLTISRLEPEDFAVYYCQHYGNSPPKFTFGPGTKLEIKTTTPAPRPPTPAPTIASQPLSLRPEACRPAAGGAVHTRGLDFACDIYIWAPLAGTCGVLLLSLVITLYCKRGRKKLLYIFKQPFMRPVQTTQEEDGCSCRFPEEEEGGCELRVKFSRSADAPAYKQGQNQLYNELNLGRREEYDVLDKRRGRDPEMGGKPRRKNPQEGLYNELQKDKMAEAYSEIGMKGERRRGKGHDGLYQGLSTATKDTYDALHMQALPPR

SEQ ID NO: 999 - protein, 490 aa, Artificial Sequence
  source: /note="Description of Artificial Sequence: Synthetic polypeptide"
MALPVTALLLPLALLLHAARPEVQLVESGGGLVQPGGSLRLSCAASGFTFSSYAMSWVRQAPGKGLEWVSAISGSGGSTYYADSVKGRFTISRDNSKNTLYLQMNSLRAEDTAVYYCAKMGWSSGYLGAFDIWGQGTTVTVSSGGGGSGGGGSGGGGSEIVLTQSPGTLSLSPGERATLSCRASQSVASSFLAWYQQKPGQAPRLLIYGASGRATGIPDRFSGSGSGTDFTLTISRLEPEDFAVYYCQHYGGSPRLTFGGGTKVDIKTTTPAPRPPTPAPTIASQPLSLRPEACRPAAGGAVHTRGLDFACDIYIWAPLAGTCGVLLLSLVITLYCKRGRKKLLYIFKQPFMRPVQTTQEEDGCSCRFPEEEEGGCELRVKFSRSADAPAYKQGQNQLYNELNLGRREEYDVLDKRRGRDPEMGGKPRRKNPQEGLYNELQKDKMAEAYSEIGMKGERRRGKGHDGLYQGLSTATKDTYDALHMQALPPR

SEQ ID NO: 1000 - skipped

SEQ ID NO: 1001 - DNA, 1461 bp, Artificial Sequence
  source: /note="Description of Artificial Sequence: Synthetic polynucleotide"
atggccctccctgtcaccgccctgctgcttccgctggctcttctgctccacgccgctcggccccaagtgcagcttcaggaaagcggaccgggcctggtcaagccatccgaaactctctccctgacttgcactgtgtctggcggttccatctcatcgtcgtactactactggggctggattaggcagccgcccggaaagggactggagtggatcggaagcatctactattccggctcggcgtactacaaccctagcctcaagtcgagagtgaccatctccgtggatacctccaagaaccagttttccctgcgcctgagctccgtgaccgccgctgacaccgccgtgtactactgtgctcggcattggcaggaatggcccgatgccttcgacatttggggccagggcactatggtcactgtgtcatccgggggtggaggcagcgggggaggagggtccggggggggaggttcagagacaaccttgacccagtcacccgcattcatgtccgccactccgggagacaaggtcatcatctcgtgcaaagcgtcccaggatatcgacgatgccatgaattggtaccagcagaagcctggcgaagcgccgctgttcattatccaatccgcaacctcgcccgtgcctggaatcccaccgcggttcagcggcagcggtttcggaaccgacttttccctgaccattaacaacattgagtccgaggacgccgcctactacttctgcctgcaacacgacaacttccctctcacgttcggccagggaaccaagctggaaatcaagaccactaccccagcaccgaggccacccaccccggctcctaccatcgcctcccagcctctgtccctgcgtccggaggcatgtagacccgcagctggtggggccgtgcatacccggggtcttgacttcgcctgcgatatctacatttgggcccctctggctggtacttgcggggtcctgctgctttcactcgtgatcactctttactgtaagcgcggtcggaagaagctgctgtacatctttaagcaacccttcatgaggcctgtgcagactactcaagaggaggacggctgttcatgccggttcccagaggaggaggaaggcggctgcgaactgcgcgtgaaattcagccgcagcgcagatgctccagcctacaagcaggggcagaaccagctctacaacgaactcaatcttggtcggagagaggagtacgacgtgctggacaagcggagaggacgggacccagaaatgggcgggaagccgcgcagaaagaatccccaagagggcctgtacaacgagctccaaaaggataagatggcagaagcctatagcgagattggtatgaaaggggaacgcagaagaggcaaaggccacgacggactgtaccagggactcagcaccgccaccaaggacacctatgacgctcttcacatgcaggccctgccgcctcgg

SEQ ID NO: 1002 - DNA, 1467 bp, Artificial Sequence
  source: /note="Description of Artificial Sequence: Synthetic polynucleotide"
atggccctccctgtcaccgccctgctgcttccgctggctcttctgctccacgccgctcggccccaagtcaatctgcgcgaatccggccccgccttggtcaagcctacccagaccctcactctgacctgtactttctccggcttctccctgcggacttccgggatgtgcgtgtcctggatcagacagcctccgggaaaggccctggagtggctcgctcgcattgactgggatgaggacaagttctactccacctcactcaagaccaggctgaccatcagcaaagatacctctgacaaccaagtggtgctccgcatgaccaacatggacccagccgacactgccacttactactgcgcgaggagcggagcgggcggaacctccgccaccgccttcgatatttggggcccgggtaccatggtcaccgtgtcaagcggaggaggggggtccgggggcggcggttccgggggaggcggatcggacattcagatgactcagtcaccatcgtccctgagcgctagcgtgggcgacagagtgacaatcacttgccgggcatcccaggacatctataacaaccttgcgtggttccagctgaagcctggttccgcaccgcggtcacttatgtacgccgccaacaagagccagtcgggagtgccgtcccggttttccggttcggcctcgggaactgacttcaccctgacgatctccagcctgcaacccgaggatttcgccacctactactgccagcactactaccgctttccctactcgttcggacagggaaccaagctggaaatcaagaccactaccccagcaccgaggccacccaccccggctcctaccatcgcctcccagcctctgtccctgcgtccggaggcatgtagacccgcagctggtggggccgtgcatacccggggtcttgacttcgcctgcgatatctacatttgggcccctctggctggtacttgcggggtcctgctgctttcactcgtgatcactctttactgtaagcgcggtcggaagaagctgctgtacatctttaagcaacccttcatgaggcctgtgcagactactcaagaggaggacggctgttcatgccggttcccagaggaggaggaaggcggctgcgaactgcgcgtgaaattcagccgcagcgcagatgctccagcctacaagcaggggcagaaccagctctacaacgaactcaatcttggtcggagagaggagtacgacgtgctggacaagcggagaggacgggacccagaaatgggcgggaagccgcgcagaaagaatccccaagagggcctgtacaacgagctccaaaaggataagatggcagaagcctatagcgagattggtatgaaaggggaacgcagaagaggcaaaggccacgacggactgtaccagggactcagcaccgccaccaaggacacctatgacgctcttcacatgcaggccctgccgcctcgg

SEQ ID NO: 1003 - DNA, 1470 bp, Artificial Sequence
  source: /note="Description of Artificial Sequence: Synthetic polynucleotide"
atggccctccctgtcaccgccctgctgcttccgctggctcttctgctccacgccgctcggcccgaagtgcagcttgtcgaatccggggggggactggtcaagccgggcggatcactgagactgtcctgcgccgcgagcggcttcacgttctcctcctactccatgaactgggtccgccaagcccccgggaagggactggaatgggtgtcctctatctcctcgtcgtcgtcctacatctactacgccgactccgtgaagggaagattcaccatttcccgcgacaacgcaaagaactcactgtacttgcaaatgaactcactccgggccgaagatactgctgtgtactattgcgccaagactattgccgccgtctacgctttcgacatctggggccagggaaccaccgtgactgtgtcgtccggtggtggtggctcgggcggaggaggaagcggcggcggggggtccgagattgtgctgacccagtcgccactgagcctccctgtgacccccgaggaacccgccagcatcagctgccggtccagccagtccctgctccactccaacggatacaattacctcgattggtaccttcagaagcctggacaaagcccgcagctgctcatctacttgggatcaaaccgcgcgtcaggagtgcctgaccggttctccggctcgggcagcggtaccgatttcaccctgaaaatctccagggtggaggcagaggacgtgggagtgtattactgtatgcaggcgctgcagactccgtacacatttgggcagggcaccaagctggagatcaagaccactaccccagcaccgaggccacccaccccggctcctaccatcgcctcccagcctctgtccctgcgtccggaggcatgtagacccgcagctggtggggccgtgcatacccggggtcttgacttcgcctgcgatatctacatttgggcccctctggctggtacttgcggggtcctgctgctttcactcgtgatcactctttactgtaagcgcggtcggaagaagctgctgtacatctttaagcaacccttcatgaggcctgtgcagactactcaagaggaggacggctgttcatgccggttcccagaggaggaggaaggcggctgcgaactgcgcgtgaaattcagccgcagcgcagatgctccagcctacaagcaggggcagaaccagctctacaacgaactcaatcttggtcggagagaggagtacgacgtgctggacaagcggagaggacgggacccagaaatgggcgggaagccgcgcagaaagaatccccaagagggcctgtacaacgagctccaaaaggataagatggcagaagcctatagcgagattggtatgaaaggggaacgcagaagaggcaaaggccacgacggactgtaccagggactcagcaccgccaccaaggacacctatgacgctcttcacatgcaggccctgccgcctcgg

SEQ ID NO: 1004 - DNA, 1452 bp, Artificial Sequence
  source: /note="Description of Artificial Sequence: Synthetic polynucleotide"
atggccctccctgtcaccgccctgctgcttccgctggctcttctgctccacgccgctcggcccgaagtccagctcgtggagtccggcggaggccttgtgaagcctggaggttcgctgagactgtcctgcgccgcctccggcttcaccttctccgactactacatgtcctggatcagacaggccccgggaaagggcctggaatgggtgtcctacatctcgtcatcgggcagcactatctactacgcggactcagtgaaggggcggttcaccatttcccgggataacgcgaagaactcgctgtatctgcaaatgaactcactgagggccgaggacaccgccgtgtactactgcgcccgcgatctccgcggggcatttgacatctggggacagggaaccatggtcacagtgtccagcggagggggaggatcgggtggcggaggttccgggggtggaggctcctcctacgtgctgactcagagcccaagcgtcagcgctgcgcccggttacacggcaaccatctcctgtggcggaaacaacattgggaccaagtctgtgcactggtatcagcagaagccgggccaagctcccctgttggtgatccgcgatgactccgtgcggcctagcaaaattccgggacggttctccggctccaacagcggcaatatggccactctcaccatctcgggagtgcaggccggagatgaagccgacttctactgccaagtctgggactcagactccgagcatgtggtgttcgggggcggaaccaagctgactgtgctcaccactaccccagcaccgaggccacccaccccggctcctaccatcgcctcccagcctctgtccctgcgtccggaggcatgtagacccgcagctggtggggccgtgcatacccggggtcttgacttcgcctgcgatatctacatttgggcccctctggctggtacttgcggggtcctgctgctttcactcgtgatcactctttactgtaagcgcggtcggaagaagctgctgtacatctttaagcaacccttcatgaggcctgtgcagactactcaagaggaggacggctgttcatgccggttcccagaggaggaggaaggcggctgcgaactgcgcgtgaaattcagccgcagcgcagatgctccagcctacaagcaggggcagaaccagctctacaacgaactcaatcttggtcggagagaggagtacgacgtgctggacaagcggagaggacgggacccagaaatgggcgggaagccgcgcagaaagaatccccaagagggcctgtacaacgagctccaaaaggataagatggcagaagcctatagcgagattggtatgaaaggggaacgcagaagaggcaaaggccacgacggactgtaccagggactcagcaccgccaccaaggacacctatgacgctcttcacatgcaggccctgccgcctcgg

SEQ ID NO: 1005 - DNA, 1455 bp, Artificial Sequence
  source: /note="Description of Artificial Sequence: Synthetic polynucleotide"
atggccctccctgtcaccgccctgctgcttccgctggctcttctgctccacgccgctcggccccaagtgcagctggtgcagagcggggccgaagtcaagaagccgggagcctccgtgaaagtgtcctgcaagccttcgggatacaccgtgacctcccactacattcattgggtccgccgcgcccccggccaaggactcgagtggatgggcatgatcaaccctagcggcggagtgaccgcgtacagccagacgctgcagggacgcgtgactatgacctcggatacctcctcctccaccgtctatatggaactgtccagcctgcggtccgaggataccgccatgtactactgcgcccgggaaggatcaggctccgggtggtatttcgacttctggggaagaggcaccctcgtgactgtgtcatctgggggagggggttccggtggtggcggatcgggaggaggcggttcatcctacgtgctgacccagccaccctccgtgtccgtgagccccggccagactgcatcgattacatgtagcggcgacggcctctccaagaaatacgtgtcgtggtaccagcagaaggccggacagagcccggtggtgctgatctcaagagataaggagcggcctagcggaatcccggacaggttctcgggttccaactccgcggacactgctactctgaccatctcggggacccaggctatggacgaagccgattactactgccaagcctgggacgacactactgtcgtgtttggagggggcaccaagttgaccgtccttaccactaccccagcaccgaggccacccaccccggctcctaccatcgcctcccagcctctgtccctgcgtccggaggcatgtagacccgcagctggtggggccgtgcatacccggggtcttgacttcgcctgcgatatctacatttgggcccctctggctggtacttgcggggtcctgctgctttcactcgtgatcactctttactgtaagcgcggtcggaagaagctgctgtacatctttaagcaacccttcatgaggcctgtgcagactactcaagaggaggacggctgttcatgccggttcccagaggaggaggaaggcggctgcgaactgcgcgtgaaattcagccgcagcgcagatgctccagcctacaagcaggggcagaaccagctctacaacgaactcaatcttggtcggagagaggagtacgacgtgctggacaagcggagaggacgggacccagaaatgggcgggaagccgcgcagaaagaatccccaagagggcctgtacaacgagctccaaaaggataagatggcagaagcctatagcgagattggtatgaaaggggaacgcagaagaggcaaaggccacgacggactgtaccagggactcagcaccgccaccaaggacacctatgacgctcttcacatgcaggccctgccgcctcgg

SEQ ID NO: 1006 - DNA, 1467 bp, Artificial Sequence
  source: /note="Description of Artificial Sequence: Synthetic polynucleotide"
atggccctccctgtcaccgccctgctgcttccgctggctcttctgctccacgccgctcggccccaagtgcagcttcaggagagcggcccgggactcgtgaagccgtcccagaccctgtccctgacttgcaccgtgtcgggaggaagcatctcgagcggaggctactattggtcgtggattcggcagcaccctggaaagggcctggaatggatcggctacatctactactccggctcgacctactacaacccatcgctgaagtccagagtgacaatctcagtggacacgtccaagaatcagttcagcctgaagctctcttccgtgactgcggccgacaccgccgtgtactactgcgcacgcgctggaattgccgcccggctgaggggtgccttcgacatttggggacagggcaccatggtcaccgtgtcctccggcggcggaggttccgggggtggaggctcaggaggaggggggtccgacatcgtcatgactcagtcgccctcaagcgtcagcgcgtccgtcggggacagagtgatcatcacctgtcgggcgtcccagggaattcgcaactggctggcctggtatcagcagaagcccggaaaggcccccaacctgttgatctacgccgcctcaaacctccaatccggggtgccgagccgcttcagcggctccggttcgggtgccgatttcactctgaccatctcctccctgcaacctgaagatgtggctacctactactgccaaaagtacaactccgcaccttttactttcggaccggggaccaaagtggacattaagaccactaccccagcaccgaggccacccaccccggctcctaccatcgcctcccagcctctgtccctgcgtccggaggcatgtagacccgcagctggtggggccgtgcatacccggggtcttgacttcgcctgcgatatctacatttgggcccctctggctggtacttgcggggtcctgctgctttcactcgtgatcactctttactgtaagcgcggtcggaagaagctgctgtacatctttaagcaacccttcatgaggcctgtgcagactactcaagaggaggacggctgttcatgccggttcccagaggaggaggaaggcggctgcgaactgcgcgtgaaattcagccgcagcgcagatgctccagcctacaagcaggggcagaaccagctctacaacgaactcaatcttggtcggagagaggagtacgacgtgctggacaagcggagaggacgggacccagaaatgggcgggaagccgcgcagaaagaatccccaagagggcctgtacaacgagctccaaaaggataagatggcagaagcctatagcgagattggtatgaaaggggaacgcagaagaggcaaaggccacgacggactgtaccagggactcagcaccgccaccaaggacacctatgacgctcttcacatgcaggccctgccgcctcgg

SEQ ID NO: 1007 - DNA, 1491 bp, Artificial Sequence
  source: /note="Description of Artificial Sequence: Synthetic polynucleotide"
atggccctccctgtcaccgccctgctgcttccgctggctcttctgctccacgccgctcggccccaagtgcagctggtccagtcgggcgccgaggtcaagaagcccgggagctctgtgaaagtgtcctgcaaggcctccgggggcacctttagctcctacgccatctcctgggtccgccaagcaccgggtcaaggcctggagtggatggggggaattatccctatcttcggcactgccaactacgcccagaagttccagggacgcgtgaccattaccgcggacgaatccacctccaccgcttatatggagctgtccagcttgcgctcggaagataccgccgtgtactactgcgcccggaggggtggataccagctgctgagatgggacgtgggcctcctgcggtcggcgttcgacatctggggccagggcactatggtcactgtgtccagcggaggaggcggatcgggaggcggcggatcagggggaggcggttccagctacgtgcttactcaacccccttcggtgtccgtggccccgggacagaccgccagaatcacttgcggaggaaacaacattgggtccaagagcgtgcattggtaccagcagaagccaggacaggcccctgtgctggtgctctacgggaagaacaatcggcccagcggagtgccggacaggttctcgggttcacgctccggtacaaccgcttcactgactatcaccggggcccaggcagaggatgaagcggactactactgttcctcccgggattcatccggcgaccacctccgggtgttcggaaccggaacgaaggtcaccgtgctgaccactaccccagcaccgaggccacccaccccggctcctaccatcgcctcccagcctctgtccctgcgtccggaggcatgtagacccgcagctggtggggccgtgcatacccggggtcttgacttcgcctgcgatatctacatttgggcccctctggctggtacttgcggggtcctgctgctttcactcgtgatcactctttactgtaagcgcggtcggaagaagctgctgtacatctttaagcaacccttcatgaggcctgtgcagactactcaagaggaggacggctgttcatgccggttcccagaggaggaggaaggcggctgcgaactgcgcgtgaaattcagccgcagcgcagatgctccagcctacaagcaggggcagaaccagctctacaacgaactcaatcttggtcggagagaggagtacgacgtgctggacaagcggagaggacgggacccagaaatgggcgggaagccgcgcagaaagaatccccaagagggcctgtacaacgagctccaaaaggataagatggcagaagcctatagcgagattggtatgaaaggggaacgcagaagaggcaaaggccacgacggactgtaccagggactcagcaccgccaccaaggacacctatgacgctcttcacatgcaggccctgccgcctcgg

SEQ ID NO: 1008 - DNA, 1476 bp, Artificial Sequence
  source: /note="Description of Artificial Sequence: Synthetic polynucleotide"
atggccctccctgtcaccgccctgctgcttccgctggctcttctgctccacgccgctcggcccgaagtgcagctccaacagtcaggaccggggctcgtgaagccatcccagaccctgtccctgacttgtgccatctcgggagatagcgtgtcatcgaactccgccgcctggaactggattcggcagagcccgtcccgcggactggagtggcttggaaggacctactaccggtccaagtggtactctttctacgcgatctcgctgaagtcccgcattatcattaaccctgatacctccaagaatcagttctccctccaactgaaatccgtcacccccgaggacacagcagtgtattactgcgcacggagcagccccgaaggactgttcctgtattggtttgacccctggggccaggggactcttgtgaccgtgtcgagcggcggagatgggtccggtggcggtggttcggggggcggcggatcatcatccgaactgacccaggacccggctgtgtccgtggcgctgggacaaaccatccgcattacgtgccagggagactccctgggcaactactacgccacttggtaccagcagaagccgggccaagcccctgtgttggtcatctacgggaccaacaacagaccttccggcatccccgaccggttcagcgcttcgtcctccggcaacactgccagcctgaccatcactggagcgcaggccgaagatgaggccgactactactgcaacagcagagactcctcgggtcatcacctcttgttcggaactggaaccaaggtcaccgtgctgaccactaccccagcaccgaggccacccaccccggctcctaccatcgcctcccagcctctgtccctgcgtccggaggcatgtagacccgcagctggtggggccgtgcatacccggggtcttgacttcgcctgcgatatctacatttgggcccctctggctggtacttgcggggtcctgctgctttcactcgtgatcactctttactgtaagcgcggtcggaagaagctgctgtacatctttaagcaacccttcatgaggcctgtgcagactactcaagaggaggacggctgttcatgccggttcccagaggaggaggaaggcggctgcgaactgcgcgtgaaattcagccgcagcgcagatgctccagcctacaagcaggggcagaaccagctctacaacgaactcaatcttggtcggagagaggagtacgacgtgctggacaagcggagaggacgggacccagaaatgggcgggaagccgcgcagaaagaatccccaagagggcctgtacaacgagctccaaaaggataagatggcagaagcctatagcgagattggtatgaaaggggaacgcagaagaggcaaaggccacgacggactgtaccagggactcagcaccgccaccaaggacacctatgacgctcttcacatgcaggccctgccgcctcgg

SEQ ID NO: 1009 - DNA, 1470 bp, Artificial Sequence
  source: /note="Description of Artificial Sequence: Synthetic polynucleotide"
atggccctccctgtcaccgccctgctgcttccgctggctcttctgctccacgccgctcggcccgaagtgcagctcgtggagtcaggaggcggcctggtccagccgggagggtcccttagactgtcatgcgccgcaagcggattcactttctcctcctatgccatgagctgggtccgccaagcccccggaaagggactggaatgggtgtccgccatctcggggtctggaggctcaacttactacgctgactccgtgaagggacggttcaccattagccgcgacaactccaagaacaccctctacctccaaatgaactccctgcgggccgaggataccgccgtctactactgcgccaaagtggaaggttcaggatcgctggactactggggacagggtactctcgtgaccgtgtcatcgggcggaggaggttccggcggtggcggctccggcggcggagggtcggagatcgtgatgacccagagccctggtactctgagcctttcgccgggagaaagggccaccctgtcctgccgcgcttcccaatccgtgtcctccgcgtacttggcgtggtaccagcagaagccgggacagccccctcggctgctgatcagcggggccagcacccgggcaaccggaatcccagacagattcgggggttccggcagcggcacagatttcaccctgactatttcgaggttggagcccgaggactttgcggtgtattactgtcagcactacgggtcgtcctttaatggctccagcctgttcacgttcggacaggggacccgcctggaaatcaagaccactaccccagcaccgaggccacccaccccggctcctaccatcgcctcccagcctctgtccctgcgtccggaggcatgtagacccgcagctggtggggccgtgcatacccggggtcttgacttcgcctgcgatatctacatttgggcccctctggctggtacttgcggggtcctgctgctttcactcgtgatcactctttactgtaagcgcggtcggaagaagctgctgtacatctttaagcaacccttcatgaggcctgtgcagactactcaagaggaggacggctgttcatgccggttcccagaggaggaggaaggcggctgcgaactgcgcgtgaaattcagccgcagcgcagatgctccagcctacaagcaggggcagaaccagctctacaacgaactcaatcttggtcggagagaggagtacgacgtgctggacaagcggagaggacgggacccagaaatgggcgggaagccgcgcagaaagaatccccaagagggcctgtacaacgagctccaaaaggataagatggcagaagcctatagcgagattggtatgaaaggggaacgcagaagaggcaaaggccacgacggactgtaccagggactcagcaccgccaccaaggacacctatgacgctcttcacatgcaggccctgccgcctcgg

SEQ ID NO: 1010 - DNA, 1455 bp, Artificial Sequence
  source: /note="Description of Artificial Sequence: Synthetic polynucleotide"
atggccctccctgtcaccgccctgctgcttccgctggctcttctgctccacgccgctcggcccgaagtgcaactggtggaaaccggtggcggcctggtgcagcctggaggatcattgaggctgtcatgcgcggccagcggtattaccttctcccggtaccccatgtcctgggtcagacaggccccggggaaagggcttgaatgggtgtccgggatctcggactccggtgtcagcacttactacgccgactccgccaagggacgcttcaccatttcccgggacaactcgaagaacaccctgttcctccaaatgagctccctccgggacgaggatactgcagtgtactactgcgtgacccgcgccgggtccgaggcgtctgacatttggggacagggcactatggtcaccgtgtcgtccggcggagggggctcgggaggcggtggcagcggaggaggagggtccgagatcgtgctgacccaatccccggccaccctctcgctgagccctggagaaagggcaaccttgtcctgtcgcgcgagccagtccgtgagcaactccctggcctggtaccagcagaagcccggacaggctccgagacttctgatctacgacgcttcgagccgggccactggaatccccgaccgcttttcggggtccggctcaggaaccgatttcaccctgacaatctcacggctggagccagaggatttcgccatctattactgccagcagttcggtacttcctccggcctgactttcggaggcggcacgaagctcgaaatcaagaccactaccccagcaccgaggccacccaccccggctcctaccatcgcctcccagcctctgtccctgcgtccggaggcatgtagacccgcagctggtggggccgtgcatacccggggtcttgacttcgcctgcgatatctacatttgggcccctctggctggtacttgcggggtcctgctgctttcactcgtgatcactctttactgtaagcgcggtcggaagaagctgctgtacatctttaagcaacccttcatgaggcctgtgcagactactcaagaggaggacggctgttcatgccggttcccagaggaggaggaaggcggctgcgaactgcgcgtgaaattcagccgcagcgcagatgctccagcctacaagcaggggcagaaccagctctacaacgaactcaatcttggtcggagagaggagtacgacgtgctggacaagcggagaggacgggacccagaaatgggcgggaagccgcgcagaaagaatccccaagagggcctgtacaacgagctccaaaaggataagatggcagaagcctatagcgagattggtatgaaaggggaacgcagaagaggcaaaggccacgacggactgtaccagggactcagcaccgccaccaaggacacctatgacgctcttcacatgcaggccctgccgcctcgg

SEQ ID NO: 1011 - DNA, 1476 bp, Artificial Sequence
  source: /note="Description of Artificial Sequence: Synthetic polynucleotide"
atggccctccctgtcaccgccctgctgcttccgctggctcttctgctccacgccgctcggccccaagtgcagctcgtggaatcgggtggcggactggtgcagccggggggctcacttagactgtcctgcgcggccagcggattcactttctcctcctacgccatgtcctgggtcagacaggcccctggaaagggcctggaatgggtgtccgcaatcagcggcagcggcggctcgacctattacgcggattcagtgaagggcagattcaccatttcccgggacaacgccaagaactccttgtaccttcaaatgaactccctccgcgcggaagataccgcaatctactactgcgctcgggccacttacaagagggaactgcgctactactacgggatggacgtctggggccagggaaccatggtcaccgtgtccagcggaggaggaggatcgggaggaggcggtagcgggggtggagggtcggagatcgtgatgacccagtcccccggcactgtgtcgctgtcccccggcgaacgggccaccctgtcatgtcgggccagccagtcagtgtcgtcaagcttcctcgcctggtaccagcagaaaccgggacaagctccccgcctgctgatctacggagccagcagccgggccaccggtattcctgaccggttctccggttcggggtccgggaccgactttactctgactatctctcgcctcgagccagaggactccgccgtgtattactgccagcagtaccactcctccccgtcctggacgttcggacagggcacaaggctggagattaagaccactaccccagcaccgaggccacccaccccggctcctaccatcgcctcccagcctctgtccctgcgtccggaggcatgtagacccgcagctggtggggccgtgcatacccggggtcttgacttcgcctgcgatatctacatttgggcccctctggctggtacttgcggggtcctgctgctttcactcgtgatcactctttactgtaagcgcggtcggaagaagctgctgtacatctttaagcaacccttcatgaggcctgtgcagactactcaagaggaggacggctgttcatgccggttcccagaggaggaggaaggcggctgcgaactgcgcgtgaaattcagccgcagcgcagatgctccagcctacaagcaggggcagaaccagctctacaacgaactcaatcttggtcggagagaggagtacgacgtgctggacaagcggagaggacgggacccagaaatgggcgggaagccgcgcagaaagaatccccaagagggcctgtacaacgagctccaaaaggataagatggcagaagcctatagcgagattggtatgaaaggggaacgcagaagaggcaaaggccacgacggactgtaccagggactcagcaccgccaccaaggacacctatgacgctcttcacatgcaggccctgccgcctcgg

SEQ ID NO: 1012 - DNA, 1476 bp, Artificial Sequence
  source: /note="Description of Artificial Sequence: Synthetic polynucleotide"
atggccctccctgtcaccgccctgctgcttccgctggctcttctgctccacgccgctcggcccgaggtgcagcttgtggaaaccggtggcggactggtgcagcccggaggaagcctcaggctgtcctgcgccgcgtccggcttcaccttctcctcgtacgccatgtcctgggtccgccaggcccccggaaagggcctggaatgggtgtccgccatctctggaagcggaggttccacgtactacgcggacagcgtcaagggaaggttcacaatctcccgcgataattcgaagaacactctgtaccttcaaatgaacaccctgaaggccgaggacactgctgtgtactactgcgcacgggccacctacaagagagagctccggtactactacggaatggacgtctggggccagggaactactgtgaccgtgtcctcgggagggggtggctccggggggggcggctccggcggaggcggttccgagattgtgctgacccagtcaccttcaactctgtcgctgtccccgggagagagcgctactctgagctgccgggccagccagtccgtgtccaccaccttcctcgcctggtatcagcagaagccggggcaggcaccacggctcttgatctacgggtcaagcaacagagcgaccggaattcctgaccgcttctcggggagcggttcaggcaccgacttcaccctgactatccggcgcctggaacccgaagatttcgccgtgtattactgtcaacagtaccactcctcgccgtcctggacctttggccaaggaaccaaagtggaaatcaagaccactaccccagcaccgaggccacccaccccggctcctaccatcgcctcccagcctctgtccctgcgtccggaggcatgtagacccgcagctggtggggccgtgcatacccggggtcttgacttcgcctgcgatatctacatttgggcccctctggctggtacttgcggggtcctgctgctttcactcgtgatcactctttactgtaagcgcggtcggaagaagctgctgtacatctttaagcaacccttcatgaggcctgtgcagactactcaagaggaggacggctgttcatgccggttcccagaggaggaggaaggcggctgcgaactgcgcgtgaaattcagccgcagcgcagatgctccagcctacaagcaggggcagaaccagctctacaacgaactcaatcttggtcggagagaggagtacgacgtgctggacaagcggagaggacgggacccagaaatgggcgggaagccgcgcagaaagaatccccaagagggcctgtacaacgagctccaaaaggataagatggcagaagcctatagcgagattggtatgaaaggggaacgcagaagaggcaaaggccacgacggactgtaccagggactcagcaccgccaccaaggacacctatgacgctcttcacatgcaggccctgccgcctcgg

SEQ ID NO: 1013 - DNA, 1449 bp, Artificial Sequence
  source: /note="Description of Artificial Sequence: Synthetic polynucleotide"
atggccctccctgtcaccgccctgctgcttccgctggctcttctgctccacgccgctcggcccgaagtgcagctcgtggaaactggaggtggactcgtgcagcctggacggtcgctgcggctgagctgcgctgcatccggcttcaccttcgacgattatgccatgcactgggtcagacaggcgccagggaagggacttgagtgggtgtccggtatcagctggaatagcggctcaatcggatacgcggactccgtgaagggaaggttcaccatttcccgcgacaacgccaagaactccctgtacttgcaaatgaacagcctccgggatgaggacactgccgtgtactactgcgcccgcgtcggaaaagctgtgcccgacgtctggggccagggaaccactgtgaccgtgtccagcggcgggggtggatcgggcggtggagggtccggtggagggggctcagatattgtgatgacccagaccccctcgtccctgtccgcctcggtcggcgaccgcgtgactatcacatgtagagcctcgcagagcatctccagctacctgaactggtatcagcagaagccggggaaggccccgaagctcctgatctacgcggcatcatcactgcaatcgggagtgccgagccggttttccgggtccggctccggcaccgacttcacgctgaccatttcttccctgcaacccgaggacttcgccacttactactgccagcagtcctactccaccccttactccttcggccaaggaaccaggctggaaatcaagaccactaccccagcaccgaggccacccaccccggctcctaccatcgcctcccagcctctgtccctgcgtccggaggcatgtagacccgcagctggtggggccgtgcatacccggggtcttgacttcgcctgcgatatctacatttgggcccctctggctggtacttgcggggtcctgctgctttcactcgtgatcactctttactgtaagcgcggtcggaagaagctgctgtacatctttaagcaacccttcatgaggcctgtgcagactactcaagaggaggacggctgttcatgccggttcccagaggaggaggaaggcggctgcgaactgcgcgtgaaattcagccgcagcgcagatgctccagcctacaagcaggggcagaaccagctctacaacgaactcaatcttggtcggagagaggagtacgacgtgctggacaagcggagaggacgggacccagaaatgggcgggaagccgcgcagaaagaatccccaagagggcctgtacaacgagctccaaaaggataagatggcagaagcctatagcgagattggtatgaaaggggaacgcagaagaggcaaaggccacgacggactgtaccagggactcagcaccgccaccaaggacacctatgacgctcttcacatgcaggccctgccgcctcgg

SEQ ID NO: 1014 - DNA, 1470 bp, Artificial Sequence
  source: /note="Description of Artificial Sequence: Synthetic polynucleotide"
atggccctccctgtcaccgccctgctgcttccgctggctcttctgctccacgccgctcggcccgaagtgcagctcgtggagagcgggggaggattggtgcagcccggaaggtccctgcggctctcctgcactgcgtctggcttcaccttcgacgactacgcgatgcactgggtcagacagcgcccgggaaagggcctggaatgggtcgcctcaatcaactggaagggaaactccctggcctatggcgacagcgtgaagggccgcttcgccatttcgcgcgacaacgccaagaacaccgtgtttctgcaaatgaattccctgcggaccgaggataccgctgtgtactactgcgccagccaccagggcgtggcatactataactacgccatggacgtgtggggaagagggacgctcgtcaccgtgtcctccgggggcggtggatcgggtggaggaggaagcggtggcgggggcagcgaaatcgtgctgactcagagcccgggaactctttcactgtccccgggagaacgggccactctctcgtgccgggccacccagtccatcggctcctccttccttgcctggtaccagcagaggccaggacaggcgccccgcctgctgatctacggtgcttcccaacgcgccactggcattcctgaccggttcagcggcagagggtcgggaaccgatttcacactgaccatttcccgggtggagcccgaagattcggcagtctactactgtcagcattacgagtcctccccttcatggaccttcggtcaagggaccaaagtggagatcaagaccactaccccagcaccgaggccacccaccccggctcctaccatcgcctcccagcctctgtccctgcgtccggaggcatgtagacccgcagctggtggggccgtgcatacccggggtcttgacttcgcctgcgatatctacatttgggcccctctggctggtacttgcggggtcctgctgctttcactcgtgatcactctttactgtaagcgcggtcggaagaagctgctgtacatctttaagcaacccttcatgaggcctgtgcagactactcaagaggaggacggctgttcatgccggttcccagaggaggaggaaggcggctgcgaactgcgcgtgaaattcagccgcagcgcagatgctccagcctacaagcaggggcagaaccagctctacaacgaactcaatcttggtcggagagaggagtacgacgtgctggacaagcggagaggacgggacccagaaatgggcgggaagccgcgcagaaagaatccccaagagggcctgtacaacgagctccaaaaggataagatggcagaagcctatagcgagattggtatgaaaggggaacgcagaagaggcaaaggccacgacggactgtaccagggactcagcaccgccaccaaggacacctatgacgctcttcacatgcaggccctgccgcctcgg

SEQ ID NO: 1015 - DNA, 1455 bp, Artificial Sequence
  source: /note="Description of Artificial Sequence: Synthetic polynucleotide"
atggccctccctgtcaccgccctgctgcttccgctggctcttctgctccacgccgctcggcccgaggtgcagttggtcgaaagcgggggcgggcttgtgcagcctggcggatcactgcggctgtcctgcgcggcatcaggcttcacgttttcttcctacgccatgtcctgggtgcgccaggcccctggaaagggactggaatgggtgtccgcgatttcggggtccggcgggagcacctactacgccgattccgtgaagggccgcttcactatctcgcgggacaactccaagaacaccctctacctccaaatgaatagcctgcgggccgaggataccgccgtctactattgcgctaaggtcgtgcgcgacggaatggacgtgtggggacagggtaccaccgtgacagtgtcctcggggggaggcggtagcggcggaggaggaagcggtggtggaggttccgagattgtgctgactcaatcacccgcgaccctgagcctgtcccccggcgaaagggccactctgtcctgtcgggccagccaatcagtctcctcctcgtacctggcctggtaccagcagaagccaggacaggctccgagactccttatctatggcgcatcctcccgcgccaccggaatcccggataggttctcgggaaacggatcggggaccgacttcactctcaccatctcccggctggaaccggaggacttcgccgtgtactactgccagcagtacggcagcccgcctagattcactttcggccccggcaccaaagtggacatcaagaccactaccccagcaccgaggccacccaccccggctcctaccatcgcctcccagcctctgtccctgcgtccggaggcatgtagacccgcagctggtggggccgtgcatacccggggtcttgacttcgcctgcgatatctacatttgggcccctctggctggtacttgcggggtcctgctgctttcactcgtgatcactctttactgtaagcgcggtcggaagaagctgctgtacatctttaagcaacccttcatgaggcctgtgcagactactcaagaggaggacggctgttcatgccggttcccagaggaggaggaaggcggctgcgaactgcgcgtgaaattcagccgcagcgcagatgctccagcctacaagcaggggcagaaccagctctacaacgaactcaatcttggtcggagagaggagtacgacgtgctggacaagcggagaggacgggacccagaaatgggcgggaagccgcgcagaaagaatccccaagagggcctgtacaacgagctccaaaaggataagatggcagaagcctatagcgagattggtatgaaaggggaacgcagaagaggcaaaggccacgacggactgtaccagggactcagcaccgccaccaaggacacctatgacgctcttcacatgcaggccctgccgcctcgg

SEQ ID NO: 1016 - DNA, 1458 bp, Artificial Sequence
  source: /note="Description of Artificial Sequence: Synthetic polynucleotide"
atggccctccctgtcaccgccctgctgcttccgctggctcttctgctccacgccgctcggcccgaagtgcagctgctggagtccggcggtggattggtgcaaccggggggatcgctcagactgtcctgtgcggcgtcaggcttcaccttctcgagctacgccatgtcatgggtcagacaggcccctggaaagggtctggaatgggtgtccgccatttccgggagcgggggatctacatactacgccgatagcgtgaagggccgcttcaccatttcccgggacaactccaagaacactctctatctgcaaatgaactccctccgcgctgaggacactgccgtgtactactgcgccaaaatccctcagaccggcaccttcgactactggggacaggggactctggtcaccgtcagcagcggtggcggaggttcggggggaggaggaagcggcggcggagggtccgagattgtgctgacccagtcacccggcactttgtccctgtcgcctggagaaagggccaccctttcctgccgggcatcccaatccgtgtcctcctcgtacctggcctggtaccagcagaggcccggacaggccccacggcttctgatctacggagcaagcagccgcgcgaccggtatcccggaccggttttcgggctcgggctcaggaactgacttcaccctcaccatctcccgcctggaacccgaagatttcgctgtgtattactgccagcactacggcagctccccgtcctggacgttcggccagggaactcggctggagatcaagaccactaccccagcaccgaggccacccaccccggctcctaccatcgcctcccagcctctgtccctgcgtccggaggcatgtagacccgcagctggtggggccgtgcatacccggggtcttgacttcgcctgcgatatctacatttgggcccctctggctggtacttgcggggtcctgctgctttcactcgtgatcactctttactgtaagcgcggtcggaagaagctgctgtacatctttaagcaacccttcatgaggcctgtgcagactactcaagaggaggacggctgttcatgccggttcccagaggaggaggaaggcggctgcgaactgcgcgtgaaattcagccgcagcgcagatgctccagcctacaagcaggggcagaaccagctctacaacgaactcaatcttggtcggagagaggagtacgacgtgctggacaagcggagaggacgggacccagaaatgggcgggaagccgcgcagaaagaatccccaagagggcctgtacaacgagctccaaaaggataagatggcagaagcctatagcgagattggtatgaaaggggaacgcagaagaggcaaaggccacgacggactgtaccagggactcagcaccgccaccaaggacacctatgacgctcttcacatgcaggccctgccgcctcgg

SEQ ID NO: 1017 - DNA, 1476 bp, Artificial Sequence
  source: /note="Description of Artificial Sequence: Synthetic polynucleotide"
atggccctccctgtcaccgccctgctgcttccgctggctcttctgctccacgccgctcggcccgaagtgcaactggtggaaaccggtggaggactcgtgcagcctggcggcagcctccggctgagctgcgccgcttcgggattcaccttttcctcctacgcgatgtcttgggtcagacaggcccccggaaaggggctggaatgggtgtcagccatctccggctccggcggatcaacgtactacgccgactccgtgaaaggccggttcaccatgtcgcgcgagaatgacaagaactccgtgttcctgcaaatgaactccctgagggtggaggacaccggagtgtactattgtgcgcgcgccaactacaagagagagctgcggtactactacggaatggacgtctggggacagggaactatggtgaccgtgtcatccggtggagggggaagcggcggtggaggcagcgggggcgggggttcagaaattgtcatgacccagtccccgggaactctttccctctcccccggggaatccgcgactttgtcctgccgggccagccagcgcgtggcctcgaactacctcgcatggtaccagcataagccaggccaagccccttccctgctgatttccggggctagcagccgcgccactggcgtgccggataggttctcgggaagcggctcgggtaccgatttcaccctggcaatctcgcggctggaaccggaggattcggccgtgtactactgccagcactatgactcatccccctcctggacattcggacagggcaccaaggtcgagatcaagaccactaccccagcaccgaggccacccaccccggctcctaccatcgcctcccagcctctgtccctgcgtccggaggcatgtagacccgcagctggtggggccgtgcatacccggggtcttgacttcgcctgcgatatctacatttgggcccctctggctggtacttgcggggtcctgctgctttcactcgtgatcactctttactgtaagcgcggtcggaagaagctgctgtacatctttaagcaacccttcatgaggcctgtgcagactactcaagaggaggacggctgttcatgccggttcccagaggaggaggaaggcggctgcgaactgcgcgtgaaattcagccgcagcgcagatgctccagcctacaagcaggggcagaaccagctctacaacgaactcaatcttggtcggagagaggagtacgacgtgctggacaagcggagaggacgggacccagaaatgggcgggaagccgcgcagaaagaatccccaagagggcctgtacaacgagctccaaaaggataagatggcagaagcctatagcgagattggtatgaaaggggaacgcagaagaggcaaaggccacgacggactgtaccagggactcagcaccgccaccaaggacacctatgacgctcttcacatgcaggccctgccgcctcgg

SEQ ID NO: 1018 - DNA, 1464 bp, Artificial Sequence
  source: /note="Description of Artificial Sequence: Synthetic polynucleotide"
atggccctccctgtcaccgccctgctgcttccgctggctcttctgctccacgccgctcggcccgaagtgcagctgctcgaaaccggtggagggctggtgcagccagggggctccctgaggctttcatgcgccgctagcggattctccttctcctcttacgccatgtcgtgggtccgccaagcccctggaaaaggcctggaatgggtgtccgcgatttccgggagcggaggttcgacctattacgccgactccgtgaagggccgctttaccatctcccgggataactccaagaacactctgtacctccaaatgaactcgctgagagccgaggacaccgccgtgtattactgcgcgaaggcgctggtcggcgcgactggggcattcgacatctggggacagggaactcttgtgaccgtgtcgagcggaggcggcggctccggcggaggagggagcgggggcggtggttccgaaatcgtgttgactcagtccccgggaaccctgagcttgtcacccggggagcgggccactctctcctgtcgcgcctcccaatcgctctcatccaatttcctggcctggtaccagcagaagcccggacaggccccgggcctgctcatctacggcgcttcaaactgggcaacgggaacccctgatcggttcagcggaagcggatcgggtactgactttaccctgaccatcaccagactggaaccggaggacttcgccgtgtactactgccagtactacggcacctcccccatgtacacattcggacagggtaccaaggtcgagattaagaccactaccccagcaccgaggccacccaccccggctcctaccatcgcctcccagcctctgtccctgcgtccggaggcatgtagacccgcagctggtggggccgtgcatacccggggtcttgacttcgcctgcgatatctacatttgggcccctctggctggtacttgcggggtcctgctgctttcactcgtgatcactctttactgtaagcgcggtcggaagaagctgctgtacatctttaagcaacccttcatgaggcctgtgcagactactcaagaggaggacggctgttcatgccggttcccagaggaggaggaaggcggctgcgaactgcgcgtgaaattcagccgcagcgcagatgctccagcctacaagcaggggcagaaccagctctacaacgaactcaatcttggtcggagagaggagtacgacgtgctggacaagcggagaggacgggacccagaaatgggcgggaagccgcgcagaaagaatccccaagagggcctgtacaacgagctccaaaaggataagatggcagaagcctatagcgagattggtatgaaaggggaacgcagaagaggcaaaggccacgacggactgtaccagggactcagcaccgccaccaaggacacctatgacgctcttcacatgcaggccctgccgcctcgg

SEQ ID NO: 1019 - DNA, 1464 bp, Artificial Sequence
  source: /note="Description of Artificial Sequence: Synthetic polynucleotide"
atggccctccctgtcaccgccctgctgcttccgctggctcttctgctccacgccgctcggcccgaagtgcagctgcttgagagcggtggaggtctggtgcagcccgggggatcactgcgcctgtcctgtgccgcgtccggtttcactttctcctcgtacgccatgtcgtgggtcagacaggcaccgggaaagggactggaatgggtgtcagccatttcgggttcggggggcagcacctactacgctgactccgtgaagggccggttcaccatttcccgcgacaactccaagaacaccttgtacctccaaatgaactccctgcgggccgaagataccgccgtgtattactgcgtgctgtggttcggagagggattcgacccgtggggacaaggaacactcgtgactgtgtcatccggcggaggcggcagcggtggcggcggttccggcggcggcggatctgacatcgtgttgacccagtcccctctgagcctgccggtcactcctggcgaaccagccagcatctcctgccggtcgagccagtccctcctgcactccaatgggtacaactacctcgattggtatctgcaaaagccgggccagagcccccagctgctgatctaccttgggtcaaaccgcgcttccggggtgcctgatagattctccgggtccgggagcggaaccgactttaccctgaaaatctcgagggtggaggccgaggacgtcggagtgtactactgcatgcaggcgctccagactcccctgaccttcggaggaggaacgaaggtcgacatcaagaccactaccccagcaccgaggccacccaccccggctcctaccatcgcctcccagcctctgtccctgcgtccggaggcatgtagacccgcagctggtggggccgtgcatacccggggtcttgacttcgcctgcgatatctacatttgggcccctctggctggtacttgcggggtcctgctgctttcactcgtgatcactctttactgtaagcgcggtcggaagaagctgctgtacatctttaagcaacccttcatgaggcctgtgcagactactcaagaggaggacggctgttcatgccggttcccagaggaggaggaaggcggctgcgaactgcgcgtgaaattcagccgcagcgcagatgctccagcctacaagcaggggcagaaccagctctacaacgaactcaatcttggtcggagagaggagtacgacgtgctggacaagcggagaggacgggacccagaaatgggcgggaagccgcgcagaaagaatccccaagagggcctgtacaacgagctccaaaaggataagatggcagaagcctatagcgagattggtatgaaaggggaacgcagaagaggcaaaggccacgacggactgtaccagggactcagcaccgccaccaaggacacctatgacgctcttcacatgcaggccctgccgcctcgg

SEQ ID NO: 1020 - DNA, 1485 bp, Artificial Sequence
  source: /note="Description of Artificial Sequence: Synthetic polynucleotide"
atggccctccctgtcaccgccctgctgcttccgctggctcttctgctccacgccgctcggccccaagtgcagctcgtggagtcaggcggaggactggtgcagcccgggggctccctgagactttcctgcgcggcatcgggttttaccttctcctcctatgctatgtcctgggtgcgccaggccccgggaaagggactggaatgggtgtccgcaatcagcggtagcgggggctcaacatactacgccgactccgtcaagggtcgcttcactatttcccgggacaactccaagaataccctgtacctccaaatgaacagcctcagggccgaggatactgccgtgtactactgcgccaaagtcggatacgatagctccggttactaccgggactactacggaatggacgtgtggggacagggcaccaccgtgaccgtgtcaagcggcggaggcggttcaggagggggaggctccggcggtggagggtccgaaatcgtcctgactcagtcgcctggcactctgtcgttgtccccgggggagcgcgctaccctgtcgtgtcgggcgtcgcagtccgtgtcgagctcctacctcgcgtggtaccagcagaagcccggacaggcccctagacttctgatctacggcacttcttcacgcgccaccgggatcagcgacaggttcagcggctccggctccgggaccgacttcaccctgaccattagccggctggagcctgaagatttcgccgtgtattactgccaacactacggaaactcgccgccaaagttcacgttcggacccggaaccaagctggaaatcaagaccactaccccagcaccgaggccacccaccccggctcctaccatcgcctcccagcctctgtccctgcgtccggaggcatgtagacccgcagctggtggggccgtgcatacccggggtcttgacttcgcctgcgatatctacatttgggcccctctggctggtacttgcggggtcctgctgctttcactcgtgatcactctttactgtaagcgcggtcggaagaagctgctgtacatctttaagcaacccttcatgaggcctgtgcagactactcaagaggaggacggctgttcatgccggttcccagaggaggaggaaggcggctgcgaactgcgcgtgaaattcagccgcagcgcagatgctccagcctacaagcaggggcagaaccagctctacaacgaactcaatcttggtcggagagaggagtacgacgtgctggacaagcggagaggacgggacccagaaatgggcgggaagccgcgcagaaagaatccccaagagggcctgtacaacgagctccaaaaggataagatggcagaagcctatagcgagattggtatgaaaggggaacgcagaagaggcaaaggccacgacggactgtaccagggactcagcaccgccaccaaggacacctatgacgctcttcacatgcaggccctgccgcctcgg

SEQ ID NO: 1021 - DNA, 1470 bp, Artificial Sequence
  source: /note="Description of Artificial Sequence: Synthetic polynucleotide"
atggccctccctgtcaccgccctgctgcttccgctggctcttctgctccacgccgctcggcccgaagtccaactggtggagtccgggggagggctcgtgcagcccggaggcagccttcggctgtcgtgcgccgcctccgggttcacgttctcatcctacgcgatgtcgtgggtcagacaggcaccaggaaagggactggaatgggtgtccgccattagcggctccggcggtagcacctactatgccgactcagtgaagggaaggttcactatctcccgcgacaacagcaagaacaccctgtacctccaaatgaactctctgcgggccgaggataccgcggtgtactattgcgccaagatgggttggtccagcggatacttgggagccttcgacatttggggacagggcactactgtgaccgtgtcctccgggggtggcggatcgggaggcggcggctcgggtggagggggttccgaaatcgtgttgacccagtcaccgggaaccctctcgctgtccccgggagaacgggctacactgtcatgtagagcgtcccagtccgtggcttcctcgttcctggcctggtaccagcagaagccgggacaggcaccccgcctgctcatctacggagccagcggccgggcgaccggcatccctgaccgcttctccggttccggctcgggcaccgactttactctgaccattagcaggcttgagcccgaggattttgccgtgtactactgccaacactacggggggagccctcgcctgaccttcggaggcggaactaaggtcgatatcaaaaccactaccccagcaccgaggccacccaccccggctcctaccatcgcctcccagcctctgtccctgcgtccggaggcatgtagacccgcagctggtggggccgtgcatacccggggtcttgacttcgcctgcgatatctacatttgggcccctctggctggtacttgcggggtcctgctgctttcactcgtgatcactctttactgtaagcgcggtcggaagaagctgctgtacatctttaagcaacccttcatgaggcctgtgcagactactcaagaggaggacggctgttcatgccggttcccagaggaggaggaaggcggctgcgaactgcgcgtgaaattcagccgcagcgcagatgctccagcctacaagcaggggcagaaccagctctacaacgaactcaatcttggtcggagagaggagtacgacgtgctggacaagcggagaggacgggacccagaaatgggcgggaagccgcgcagaaagaatccccaagagggcctgtacaacgagctccaaaaggataagatggcagaagcctatagcgagattggtatgaaaggggaacgcagaagaggcaaaggccacgacggactgtaccagggactcagcaccgccaccaaggacacctatgacgctcttcacatgcaggccctgccgcctcgg

SEQ ID NO: 1022-1041 - skipped (20 entries)

SEQ ID NO: 1042 - DNA, 1470 bp, Artificial Sequence
  source: /note="Description of Artificial Sequence: Synthetic polynucleotide"
atggccctccctgtcaccgccctgctgcttccgctggctcttctgctccacgccgctcggcccgagatccagctggtgcagtcgggagctgaagtcaaaaagcctggcgcaaccgtcaagatctcgtgcaaaggatcagggttcaacatcgaggactactacatccattgggtgcaacaggcacccggaaaaggcctggagtggatggggaggattgacccagaaaatgacgaaaccaagtacggaccgatcttccaaggacgggtgaccatcacggctgacacttccactaacaccgtctacatggaactctcgagccttcgctcggaagataccgcggtgtactactgcgcctttagaggtggagtctactggggacaagggactaccgtcaccgtgtcgtcaggtggcggaggatcaggcggaggcggctccggtggaggaggaagcggaggaggtggctccgacgtggtgatgacgcagtcaccggactccttggcggtgagcctgggtgaacgcgccactatcaactgcaagagctcccagagcttgctggactccgatggaaagacttatctcaattggctgcaacagaagcctggccagccgccaaagagactcatctcactggtgagcaagctggatagcggagtgccagatcggttttcgggatcgggctcaggcaccgacttcaccctgactatttcctccctccaagccgaggatgtggccgtctactactgttggcaggggactcacttcccggggaccttcggtggaggcactaaggtggagatcaaaaccactaccccagcaccgaggccacccaccccggctcctaccatcgcctcccagcctctgtccctgcgtccggaggcatgtagacccgcagctggtggggccgtgcatacccggggtcttgacttcgcctgcgatatctacatttgggcccctctggctggtacttgcggggtcctgctgctttcactcgtgatcactctttactgtaagcgcggtcggaagaagctgctgtacatctttaagcaacccttcatgaggcctgtgcagactactcaagaggaggacggctgttcatgccggttcccagaggaggaggaaggcggctgcgaactgcgcgtgaaattcagccgcagcgcagatgctccagcctacaagcaggggcagaaccagctctacaacgaactcaatcttggtcggagagaggagtacgacgtgctggacaagcggagaggacgggacccagaaatgggcgggaagccgcgcagaaagaatccccaagagggcctgtacaacgagctccaaaaggataagatggcagaagcctatagcgagattggtatgaaaggggaacgcagaagaggcaaaggccacgacggactgtaccagggactcagcaccgccaccaaggacacctatgacgctcttcacatgcaggccctgccgcctcgg

SEQ ID NO: 1043 - protein, 490 aa, Artificial Sequence
  source: /note="Description of Artificial Sequence: Synthetic polypeptide"
MALPVTALLLPLALLLHAARPEIQLVQSGAEVKKPGATVKISCKGSGFNIEDYYIHWVQQAPGKGLEWMGRIDPENDETKYGPIFQGRVTITADTSTNTVYMELSSLRSEDTAVYYCAFRGGVYWGQGTTVTVSSGGGGSGGGGSGGGGSGGGGSDVVMTQSPDSLAVSLGERATINCKSSQSLLDSDGKTYLNWLQQKPGQPPKRLISLVSKLDSGVPDRFSGSGSGTDFTLTISSLQAEDVAVYYCWQGTHFPGTFGGGTKVEIKTTTPAPRPPTPAPTIASQPLSLRPEACRPAAGGAVHTRGLDFACDIYIWAPLAGTCGVLLLSLVITLYCKRGRKKLLYIFKQPFMRPVQTTQEEDGCSCRFPEEEEGGCELRVKFSRSADAPAYKQGQNQLYNELNLGRREEYDVLDKRRGRDPEMGGKPRRKNPQEGLYNELQKDKMAEAYSEIGMKGERRRGKGHDGLYQGLSTATKDTYDALHMQALPPR

SEQ ID NO: 1044-1047 - skipped (4 entries)

SEQ ID NO: 1048 - DNA, 1470 bp, Artificial Sequence
  source: /note="Description of Artificial Sequence: Synthetic polynucleotide"
atggccctccctgtcaccgccctgctgcttccgctggctcttctgctccacgccgctcggcccgacgtggtcatgactcaaagcccagattccttggctgtctcccttggagaaagagcaacgatcaattgcaaaagctcgcagtccctgttggactccgatggaaaaacctacctcaactggctgcagcagaagccgggacaaccaccaaagcggctgatttccctcgtgtccaagctggacagcggcgtgccggatcgcttctcgggcagcggctcgggaaccgattttactctcactatttcgtcactgcaagcggaggacgtggcggtgtattactgctggcagggcactcacttcccgggtacttttggtggaggtaccaaagtcgaaatcaagggtggaggcgggagcggaggaggcgggtcgggaggaggaggatcgggtggcggaggctcagaaatccagctggtgcagtcaggtgccgaagtgaagaagcctggggccacggtgaagatctcgtgcaaggggagcggattcaacatcgaggattactacatccattgggtgcaacaggcccctggcaaagggctggaatggatgggaaggatcgaccccgagaatgacgagactaagtacggcccgatcttccaaggacgggtgaccatcactgcagacacttcaaccaacaccgtctacatggaactctcctcgctgcgctccgaggacaccgccgtgtactactgtgctttcagaggaggagtctactggggacagggaacgaccgtgaccgtcagctcaaccactaccccagcaccgaggccacccaccccggctcctaccatcgcctcccagcctctgtccctgcgtccggaggcatgtagacccgcagctggtggggccgtgcatacccggggtcttgacttcgcctgcgatatctacatttgggcccctctggctggtacttgcggggtcctgctgctttcactcgtgatcactctttactgtaagcgcggtcggaagaagctgctgtacatctttaagcaacccttcatgaggcctgtgcagactactcaagaggaggacggctgttcatgccggttcccagaggaggaggaaggcggctgcgaactgcgcgtgaaattcagccgcagcgcagatgctccagcctacaagcaggggcagaaccagctctacaacgaactcaatcttggtcggagagaggagtacgacgtgctggacaagcggagaggacgggacccagaaatgggcgggaagccgcgcagaaagaatccccaagagggcctgtacaacgagctccaaaaggataagatggcagaagcctatagcgagattggtatgaaaggggaacgcagaagaggcaaaggccacgacggactgtaccagggactcagcaccgccaccaaggacacctatgacgctcttcacatgcaggccctgccgcctcgg

SEQ ID NO: 1049 - protein, 490 aa, Artificial Sequence
  source: /note="Description of Artificial Sequence: Synthetic polypeptide"
MALPVTALLLPLALLLHAARPDVVMTQSPDSLAVSLGERATINCKSSQSLLDSDGKTYLNWLQQKPGQPPKRLISLVSKLDSGVPDRFSGSGSGTDFTLTISSLQAEDVAVYYCWQGTHFPGTFGGGTKVEIKGGGGSGGGGSGGGGSGGGGSEIQLVQSGAEVKKPGATVKISCKGSGFNIEDYYIHWVQQAPGKGLEWMGRIDPENDETKYGPIFQGRVTITADTSTNTVYMELSSLRSEDTAVYYCAFRGGVYWGQGTTVTVSSTTTPAPRPPTPAPTIASQPLSLRPEACRPAAGGAVHTRGLDFACDIYIWAPLAGTCGVLLLSLVITLYCKRGRKKLLYIFKQPFMRPVQTTQEEDGCSCRFPEEEEGGCELRVKFSRSADAPAYKQGQNQLYNELNLGRREEYDVLDKRRGRDPEMGGKPRRKNPQEGLYNELQKDKMAEAYSEIGMKGERRRGKGHDGLYQGLSTATKDTYDALHMQALPPR

SEQ ID NO: 1050-1053 - skipped (4 entries)

SEQ ID NO: 1054 - DNA, 1470 bp, Artificial Sequence
  source: /note="Description of Artificial Sequence: Synthetic polynucleotide"
atggccctccctgtcaccgccctgctgcttccgctggctcttctgctccacgccgctcggcccgaaatccagctggtgcaaagcggagccgaggtgaagaagcccggagaatccctgcgcatctcgtgtaagggttccggctttaacatcgaggattactacatccactgggtgagacagatgccgggcaaaggtctggaatggatgggccgcatcgacccggagaacgacgaaaccaaatacggaccaatcttccaaggacatgtgactatttccgcggatacctccatcaacactgtctacttgcagtggagctcgctcaaggcgtcggataccgccatgtactactgcgcattcagaggaggtgtgtactggggccagggcactacggtcaccgtgtcctcgggaggtggagggtcaggaggcggaggctcgggcggtggaggatcaggcggaggaggaagcgatgtggtcatgactcaatccccactgtcactgcctgtcactctggggcaaccggcttccatctcatgcaagtcaagccaatcgctgctcgactccgacggaaaaacctacctcaattggcttcagcagcgcccaggccagtcgcctcggaggctgatctcactcgtgtcgaagcttgactccggggtgccggatcggtttagcggaagcggatcggggaccgacttcacgttgaagattagccgggtggaagccgaggacgtgggagtctattactgctggcaggggacccacttcccggggactttcggaggaggcaccaaagtcgagattaagaccactaccccagcaccgaggccacccaccccggctcctaccatcgcctcccagcctctgtccctgcgtccggaggcatgtagacccgcagctggtggggccgtgcatacccggggtcttgacttcgcctgcgatatctacatttgggcccctctggctggtacttgcggggtcctgctgctttcactcgtgatcactctttactgtaagcgcggtcggaagaagctgctgtacatctttaagcaacccttcatgaggcctgtgcagactactcaagaggaggacggctgttcatgccggttcccagaggaggaggaaggcggctgcgaactgcgcgtgaaattcagccgcagcgcagatgctccagcctacaagcaggggcagaaccagctctacaacgaactcaatcttggtcggagagaggagtacgacgtgctggacaagcggagaggacgggacccagaaatgggcgggaagccgcgcagaaagaatccccaagagggcctgtacaacgagctccaaaaggataagatggcagaagcctatagcgagattggtatgaaaggggaacgcagaagaggcaaaggccacgacggactgtaccagggactcagcaccgccaccaaggacacctatgacgctcttcacatgcaggccctgccgcctcgg

SEQ ID NO: 1055 - protein, 490 aa, Artificial Sequence
  source: /note="Description of Artificial Sequence: Synthetic polypeptide"
MALPVTALLLPLALLLHAARPEIQLVQSGAEVKKPGESLRISCKGSGFNIEDYYIHWVRQMPGKGLEWMGRIDPENDETKYGPIFQGHVTISADTSINTVYLQWSSLKASDTAMYYCAFRGGVYWGQGTTVTVSSGGGGSGGGGSGGGGSGGGGSDVVMTQSPLSLPVTLGQPASISCKSSQSLLDSDGKTYLNWLQQRPGQSPRRLISLVSKLDSGVPDRFSGSGSGTDFTLKISRVEAEDVGVYYCWQGTHFPGTFGGGTKVEIKTTTPAPRPPTPAPTIASQPLSLRPEACRPAAGGAVHTRGLDFACDIYIWAPLAGTCGVLLLSLVITLYCKRGRKKLLYIFKQPFMRPVQTTQEEDGCSCRFPEEEEGGCELRVKFSRSADAPAYKQGQNQLYNELNLGRREEYDVLDKRRGRDPEMGGKPRRKNPQEGLYNELQKDKMAEAYSEIGMKGERRRGKGHDGLYQGLSTATKDTYDALHMQALPPR

SEQ ID NO: 1056-1059 - skipped (4 entries)

SEQ ID NO: 1060 - DNA, 1470 bp, Artificial Sequence
  source: /note="Description of Artificial Sequence: Synthetic polynucleotide"
atggccctccctgtcaccgccctgctgcttccgctggctcttctgctccacgccgctcggcccgacgtcgtcatgacccaatcccctctctccctgccggtcaccctgggtcagccggcgtcgatctcatgcaaaagctcacagtccctgctggattcggacggaaaaacctacttgaactggctccaacagaggccgggtcagtcccctcgcagactgatctcgctggtgagcaagctcgactcgggtgtgccggatcggttctccgggtcaggatcgggcaccgactttacgctcaagatttcgagagtggaggccgaggatgtgggagtgtactattgctggcagggcacgcatttccccgggacctttggaggcgggactaaggtggaaatcaagggaggtggcggatcaggcggaggaggcagcggcggaggtggatcaggaggcggagggtcagagatccagctggtccaaagcggagcagaggtgaagaagccaggcgagtcccttcgcatttcgtgcaaagggagcggcttcaacattgaagattactacatccactgggtgcggcaaatgccaggaaagggtctggaatggatgggacggatcgacccagaaaatgatgaaactaagtacggaccgatcttccaaggacacgtcactatctccgcggacacttcgatcaacaccgtgtacctccagtggagcagcttgaaagcctccgacaccgctatgtactactgtgccttccgcggaggagtctactggggacaggggactactgtgaccgtgtcgtccaccactaccccagcaccgaggccacccaccccggctcctaccatcgcctcccagcctctgtccctgcgtccggaggcatgtagacccgcagctggtggggccgtgcatacccggggtcttgacttcgcctgcgatatctacatttgggcccctctggctggtacttgcggggtcctgctgctttcactcgtgatcactctttactgtaagcgcggtcggaagaagctgctgtacatctttaagcaacccttcatgaggcctgtgcagactactcaagaggaggacggctgttcatgccggttcccagaggaggaggaaggcggctgcgaactgcgcgtgaaattcagccgcagcgcagatgctccagcctacaagcaggggcagaaccagctctacaacgaactcaatcttggtcggagagaggagtacgacgtgctggacaagcggagaggacgggacccagaaatgggcgggaagccgcgcagaaagaatccccaagagggcctgtacaacgagctccaaaaggataagatggcagaagcctatagcgagattggtatgaaaggggaacgcagaagaggcaaaggccacgacggactgtaccagggactcagcaccgccaccaaggacacctatgacgctcttcacatgcaggccctgccgcctcgg

SEQ ID NO: 1061 - protein, 490 aa, Artificial Sequence
  source: /note="Description of Artificial Sequence: Synthetic polypeptide"
MALPVTALLLPLALLLHAARPDVVMTQSPLSLPVTLGQPASISCKSSQSLLDSDGKTYLNWLQQRPGQSPRRLISLVSKLDSGVPDRFSGSGSGTDFTLKISRVEAEDVGVYYCWQGTHFPGTFGGGTKVEIKGGGGSGGGGSGGGGSGGGGSEIQLVQSGAEVKKPGESLRISCKGSGFNIEDYYIHWVRQMPGKGLEWMGRIDPENDETKYGPIFQGHVTISADTSINTVYLQWSSLKASDTAMYYCAFRGGVYWGQGTTVTVSSTTTPAPRPPTPAPTIASQPLSLRPEACRPAAGGAVHTRGLDFACDIYIWAPLAGTCGVLLLSLVITLYCKRGRKKLLYIFKQPFMRPVQTTQEEDGCSCRFPEEEEGGCELRVKFSRSADAPAYKQGQNQLYNELNLGRREEYDVLDKRRGRDPEMGGKPRRKNPQEGLYNELQKDKMAEAYSEIGMKGERRRGKGHDGLYQGLSTATKDTYDALHMQALPPR

SEQ ID NO: 1062-1065 - skipped (4 entries)

SEQ ID NO: 1066 - DNA, 1470 bp, Artificial Sequence
  source: /note="Description of Artificial Sequence: Synthetic polynucleotide"
atggccctccctgtcaccgccctgctgcttccgctggctcttctgctccacgccgctcggcccgaaatccagctcgtgcagagcggagccgaggtcaagaaaccgggtgctaccgtgaagatttcatgcaagggatcgggcttcaacatcgaggattactacatccactgggtgcagcaggcaccaggaaaaggacttgaatggatgggccggatcgacccggaaaatgacgagactaagtacggccctatcttccaaggacgggtgacgatcaccgcagacactagcaccaacaccgtctatatggaactctcgtccctgaggtccgaagatactgccgtgtactactgtgcgtttcgcggaggtgtgtactggggacagggtaccaccgtcaccgtgtcatcgggcggtggaggctccggtggaggagggtcaggaggcggtggaagcggaggaggcggcagcgacgtggtcatgactcaatcgccgctgtcgctgcccgtcactctgggacaacccgcgtccatcagctgcaaatcctcgcagtcactgcttgactccgatggaaagacctacctcaactggctgcagcaacgcccaggccaatccccaagacgcctgatctcgttggtgtcaaagctggactcaggggtgccggaccggttctccgggagcgggtcgggcacggatttcactctcaagatctccagagtggaagccgaggatgtgggagtctactactgctggcagggaacccatttccctggaacttttggcggaggaactaaggtcgagattaaaaccactaccccagcaccgaggccacccaccccggctcctaccatcgcctcccagcctctgtccctgcgtccggaggcatgtagacccgcagctggtggggccgtgcatacccggggtcttgacttcgcctgcgatatctacatttgggcccctctggctggtacttgcggggtcctgctgctttcactcgtgatcactctttactgtaagcgcggtcggaagaagctgctgtacatctttaagcaacccttcatgaggcctgtgcagactactcaagaggaggacggctgttcatgccggttcccagaggaggaggaaggcggctgcgaactgcgcgtgaaattcagccgcagcgcagatgctccagcctacaagcaggggcagaaccagctctacaacgaactcaatcttggtcggagagaggagtacgacgtgctggacaagcggagaggacgggacccagaaatgggcgggaagccgcgcagaaagaatccccaagagggcctgtacaacgagctccaaaaggataagatggcagaagcctatagcgagattggtatgaaaggggaacgcagaagaggcaaaggccacgacggactgtaccagggactcagcaccgccaccaaggacacctatgacgctcttcacatgcaggccctgccgcctcgg

SEQ ID NO: 1067 - protein, 490 aa, Artificial Sequence
  source: /note="Description of Artificial Sequence: Synthetic polypeptide"
MALPVTALLLPLALLLHAARPEIQLVQSGAEVKKPGATVKISCKGSGFNIEDYYIHWVQQAPGKGLEWMGRIDPENDETKYGPIFQGRVTITADTSTNTVYMELSSLRSEDTAVYYCAFRGGVYWGQGTTVTVSSGGGGSGGGGSGGGGSGGGGSDVVMTQSPLSLPVTLGQPASISCKSSQSLLDSDGKTYLNWLQQRPGQSPRRLISLVSKLDSGVPDRFSGSGSGTDFTLKISRVEAEDVGVYYCWQGTHFPGTFGGGTKVEIKTTTPAPRPPTPAPTIASQPLSLRPEACRPAAGGAVHTRGLDFACDIYIWAPLAGTCGVLLLSLVITLYCKRGRKKLLYIFKQPFMRPVQTTQEEDGCSCRFPEEEEGGCELRVKFSRSADAPAYKQGQNQLYNELNLGRREEYDVLDKRRGRDPEMGGKPRRKNPQEGLYNELQKDKMAEAYSEIGMKGERRRGKGHDGLYQGLSTATKDTYDALHMQALPPR

SEQ ID NO: 1068-1071 - skipped (4 entries)

SEQ ID NO: 1072 - DNA, 1470 bp, Artificial Sequence
  source: /note="Description of Artificial Sequence: Synthetic polynucleotide"
atggccctccctgtcaccgccctgctgcttccgctggctcttctgctccacgccgctcggcccgagattcagctcgtgcaatcgggagcggaagtcaagaagccaggagagtccttgcggatctcatgcaagggtagcggctttaacatcgaggattactacatccactgggtgaggcagatgccggggaagggactcgaatggatgggacggatcgacccagaaaacgacgaaactaagtacggtccgatcttccaaggccatgtgactattagcgccgatacttcaatcaataccgtgtatctgcaatggtcctcattgaaagcctcagataccgcgatgtactactgtgctttcagaggaggggtctactggggacagggaactaccgtgactgtctcgtccggcggaggcgggtcaggaggtggcggcagcggaggaggagggtccggcggaggtgggtccgacgtcgtgatgacccagagccctgacagcctggcagtgagcctgggcgaaagagctaccattaactgcaaatcgtcgcagagcctgctggactcggacggaaaaacgtacctcaattggctgcagcaaaagcctggccagccaccgaagcgccttatctcactggtgtcgaagctggattcgggagtgcccgatcgcttctccggctcgggatcgggtactgacttcaccctcactatctcctcgcttcaagcagaggacgtggccgtctactactgctggcagggaacccactttccgggaaccttcggcggagggacgaaagtggagatcaagaccactaccccagcaccgaggccacccaccccggctcctaccatcgcctcccagcctctgtccctgcgtccggaggcatgtagacccgcagctggtggggccgtgcatacccggggtcttgacttcgcctgcgatatctacatttgggcccctctggctggtacttgcggggtcctgctgctttcactcgtgatcactctttactgtaagcgcggtcggaagaagctgctgtacatctttaagcaacccttcatgaggcctgtgcagactactcaagaggaggacggctgttcatgccggttcccagaggaggaggaaggcggctgcgaactgcgcgtgaaattcagccgcagcgcagatgctccagcctacaagcaggggcagaaccagctctacaacgaactcaatcttggtcggagagaggagtacgacgtgctggacaagcggagaggacgggacccagaaatgggcgggaagccgcgcagaaagaatccccaagagggcctgtacaacgagctccaaaaggataagatggcagaagcctatagcgagattggtatgaaaggggaacgcagaagaggcaaaggccacgacggactgtaccagggactcagcaccgccaccaaggacacctatgacgctcttcacatgcaggccctgccgcctcgg

SEQ ID NO: 1073 - protein, 490 aa, Artificial Sequence
  source: /note="Description of Artificial Sequence: Synthetic polypeptide"
MALPVTALLLPLALLLHAARPEIQLVQSGAEVKKPGESLRISCKGSGFNIEDYYIHWVRQMPGKGLEWMGRIDPENDETKYGPIFQGHVTISADTSINTVYLQWSSLKASDTAMYYCAFRGGVYWGQGTTVTVSSGGGGSGGGGSGGGGSGGGGSDVVMTQSPDSLAVSLGERATINCKSSQSLLDSDGKTYLNWLQQKPGQPPKRLISLVSKLDSGVPDRFSGSGSGTDFTLTISSLQAEDVAVYYCWQGTHFPGTFGGGTKVEIKTTTPAPRPPTPAPTIASQPLSLRPEACRPAAGGAVHTRGLDFACDIYIWAPLAGTCGVLLLSLVITLYCKRGRKKLLYIFKQPFMRPVQTTQEEDGCSCRFPEEEEGGCELRVKFSRSADAPAYKQGQNQLYNELNLGRREEYDVLDKRRGRDPEMGGKPRRKNPQEGLYNELQKDKMAEAYSEIGMKGERRRGKGHDGLYQGLSTATKDTYDALHMQALPPR

SEQ ID NO: 1074-1077 - skipped (4 entries)

SEQ ID NO: 1078 - DNA, 1470 bp, Artificial Sequence
  source: /note="Description of Artificial Sequence: Synthetic polynucleotide"
atggccctccctgtcaccgccctgctgcttccgctggctcttctgctccacgccgctcggcccgacgtggtgatgactcagtcgcctgactcgctggctgtgtcccttggagagcgggccactatcaattgcaagtcatcccagtcgctgctggattccgacgggaaaacctacctcaattggctgcagcaaaaaccgggacagcctccaaagcggctcatcagcctggtgtccaagttggacagcggcgtgccagaccgcttctccggttcgggaagcggtactgatttcacgctgaccatctcatccctccaagcggaggatgtggcagtctactactgttggcagggcacgcattttccgggcacttttggaggagggaccaaggtcgaaatcaagggaggaggtggctcgggcggaggaggctcgggaggaggaggatcaggaggcggtggaagcgagattcaactggtccagagcggcgcagaagtcaagaagccgggtgaatcgctcagaatctcgtgcaaaggatcgggattcaacatcgaggactactacattcactgggtcagacaaatgccgggcaaagggctggaatggatggggaggatcgaccccgaaaacgatgaaaccaagtacggaccaatcttccaagggcacgtgaccatttcggcggacacctcaatcaacactgtgtacctccagtggagctcacttaaggccagcgataccgccatgtactattgcgctttccgcggaggggtgtactggggacagggcactactgtgaccgtgtcatccaccactaccccagcaccgaggccacccaccccggctcctaccatcgcctcccagcctctgtccctgcgtccggaggcatgtagacccgcagctggtggggccgtgcatacccggggtcttgacttcgcctgcgatatctacatttgggcccctctggctggtacttgcggggtcctgctgctttcactcgtgatcactctttactgtaagcgcggtcggaagaagctgctgtacatctttaagcaacccttcatgaggcctgtgcagactactcaagaggaggacggctgttcatgccggttcccagaggaggaggaaggcggctgcgaactgcgcgtgaaattcagccgcagcgcagatgctccagcctacaagcaggggcagaaccagctctacaacgaactcaatcttggtcggagagaggagtacgacgtgctggacaagcggagaggacgggacccagaaatgggcgggaagccgcgcagaaagaatccccaagagggcctgtacaacgagctccaaaaggataagatggcagaagcctatagcgagattggtatgaaaggggaacgcagaagaggcaaaggccacgacggactgtaccagggactcagcaccgccaccaaggacacctatgacgctcttcacatgcaggccctgccgcctcgg

SEQ ID NO: 1079 - protein, 490 aa, Artificial Sequence
  source: /note="Description of Artificial Sequence: Synthetic polypeptide"
MALPVTALLLPLALLLHAARPDVVMTQSPDSLAVSLGERATINCKSSQSLLDSDGKTYLNWLQQKPGQPPKRLISLVSKLDSGVPDRFSGSGSGTDFTLTISSLQAEDVAVYYCWQGTHFPGTFGGGTKVEIKGGGGSGGGGSGGGGSGGGGSEIQLVQSGAEVKKPGESLRISCKGSGFNIEDYYIHWVRQMPGKGLEWMGRIDPENDETKYGPIFQGHVTISADTSINTVYLQWSSLKASDTAMYYCAFRGGVYWGQGTTVTVSSTTTPAPRPPTPAPTIASQPLSLRPEACRPAAGGAVHTRGLDFACDIYIWAPLAGTCGVLLLSLVITLYCKRGRKKLLYIFKQPFMRPVQTTQEEDGCSCRFPEEEEGGCELRVKFSRSADAPAYKQGQNQLYNELNLGRREEYDVLDKRRGRDPEMGGKPRRKNPQEGLYNELQKDKMAEAYSEIGMKGERRRGKGHDGLYQGLSTATKDTYDALHMQALPPR

SEQ ID NO: 1080-1083 - skipped (4 entries)

SEQ ID NO: 1084 - DNA, 1470 bp, Artificial Sequence
  source: /note="Description of Artificial Sequence: Synthetic polynucleotide"
atggccctccctgtcaccgccctgctgcttccgctggctcttctgctccacgccgctcggcccgatgtggtcatgacgcagtcaccactgtccctccccgtgacccttggacagccagcgtcgattagctgcaagtcatcccaatccctgctcgattcggatggaaagacctatctcaactggctgcagcaaagacccggtcagagccctaggagactcatctcgttggtgtcaaagctggacagcggagtgccggaccggttttccggttcgggatcggggacggacttcactctgaagatttcacgggtggaagctgaggatgtgggagtgtactactgctggcagggaacccatttccctggcacttttggcggaggaactaaggtcgaaatcaagggaggaggtggctcgggaggaggcggatcgggcggaggcgggagcggcggaggagggtccgaaatccaacttgtccagtcaggagccgaagtgaagaaaccgggagccaccgtcaaaatcagctgtaagggatcgggattcaatatcgaggactactacatccactgggtgcagcaagctccgggcaaaggactggagtggatggggcgcatcgacccagagaacgacgaaaccaaatacggcccgatcttccaagggcgggtgaccatcaccgcggacacctcaactaacactgtgtacatggagctgagctccctgcgctccgaagatactgcagtctactactgcgccttccgcggtggtgtgtactggggacagggcaccactgtgactgtcagctcgaccactaccccagcaccgaggccacccaccccggctcctaccatcgcctcccagcctctgtccctgcgtccggaggcatgtagacccgcagctggtggggccgtgcatacccggggtcttgacttcgcctgcgatatctacatttgggcccctctggctggtacttgcggggtcctgctgctttcactcgtgatcactctttactgtaagcgcggtcggaagaagctgctgtacatctttaagcaacccttcatgaggcctgtgcagactactcaagaggaggacggctgttcatgccggttcccagaggaggaggaaggcggctgcgaactgcgcgtgaaattcagccgcagcgcagatgctccagcctacaagcaggggcagaaccagctctacaacgaactcaatcttggtcggagagaggagtacgacgtgctggacaagcggagaggacgggacccagaaatgggcgggaagccgcgcagaaagaatccccaagagggcctgtacaacgagctccaaaaggataagatggcagaagcctatagcgagattggtatgaaaggggaacgcagaagaggcaaaggccacgacggactgtaccagggactcagcaccgccaccaaggacacctatgacgctcttcacatgcaggccctgccgcctcgg

SEQ ID NO: 1085 - protein, 490 aa, Artificial Sequence
  source: /note="Description of Artificial Sequence: Synthetic polypeptide"
MALPVTALLLPLALLLHAARPDVVMTQSPLSLPVTLGQPASISCKSSQSLLDSDGKTYLNWLQQRPGQSPRRLISLVSKLDSGVPDRFSGSGSGTDFTLKISRVEAEDVGVYYCWQGTHFPGTFGGGTKVEIKGGGGSGGGGSGGGGSGGGGSEIQLVQSGAEVKKPGATVKISCKGSGFNIEDYYIHWVQQAPGKGLEWMGRIDPENDETKYGPIFQGRVTITADTSTNTVYMELSSLRSEDTAVYYCAFRGGVYWGQGTTVTVSSTTTPAPRPPTPAPTIASQPLSLRPEACRPAAGGAVHTRGLDFACDIYIWAPLAGTCGVLLLSLVITLYCKRGRKKLLYIFKQPFMRPVQTTQEEDGCSCRFPEEEEGGCELRVKFSRSADAPAYKQGQNQLYNELNLGRREEYDVLDKRRGRDPEMGGKPRRKNPQEGLYNELQKDKMAEAYSEIGMKGERRRGKGHDGLYQGLSTATKDTYDALHMQALPPR

SEQ ID NO: 1086-1088 - skipped (3 entries)

SEQ ID NO: 1089 - DNA, 1461 bp, Artificial Sequence
  source: /note="Description of Artificial Sequence: Synthetic polynucleotide"
atggccctccctgtcaccgccctgctgcttccgctggctcttctgctccacgccgctcggcccgagatccagctccaacagagcggagccgaactggtcaaaccgggagcgtcggtgaagttgtcatgcactggatcgggcttcaacatcgaggattactacatccactgggtcaagcaacgcaccgagcaggggctggaatggatcggacggatcgaccccgaaaacgatgaaaccaagtacgggcctatcttccaaggacgggccaccattacggctgacacgtcaagcaataccgtctacctccagctttccagcctgacctccgaggacactgccgtgtactactgcgccttcagaggaggcgtgtactggggaccaggaaccactttgaccgtgtccagcggaggcggtggatcaggaggaggaggctcaggcggtggcggctcgcacatggacgtggtcatgactcagtccccgctgaccctgtcggtggcaattggacagagcgcatccatctcgtgcaagagctcacagtcgctgctggattccgacggaaagacttatctgaactggctgctccaaagaccagggcaatcaccgaaacgccttatctccctggtgtcgaaactcgactcgggtgtgccggatcggtttaccggtagcgggtccggcacggacttcactctccgcatttcgagggtggaagcggaggatctcgggatctactactgttggcagggaacccacttccctgggacttttggaggcggaactaagctggaaatcaagaccactaccccagcaccgaggccacccaccccggctcctaccatcgcctcccagcctctgtccctgcgtccggaggcatgtagacccgcagctggtggggccgtgcatacccggggtcttgacttcgcctgcgatatctacatttgggcccctctggctggtacttgcggggtcctgctgctttcactcgtgatcactctttactgtaagcgcggtcggaagaagctgctgtacatctttaagcaacccttcatgaggcctgtgcagactactcaagaggaggacggctgttcatgccggttcccagaggaggaggaaggcggctgcgaactgcgcgtgaaattcagccgcagcgcagatgctccagcctacaagcaggggcagaaccagctctacaacgaactcaatcttggtcggagagaggagtacgacgtgctggacaagcggagaggacgggacccagaaatgggcgggaagccgcgcagaaagaatccccaagagggcctgtacaacgagctccaaaaggataagatggcagaagcctatagcgagattggtatgaaaggggaacgcagaagaggcaaaggccacgacggactgtaccagggactcagcaccgccaccaaggacacctatgacgctcttcacatgcaggccctgccgcctcgg

SEQ ID NO: 1090 - protein, 487 aa, Artificial Sequence
  source: /note="Description of Artificial Sequence: Synthetic polypeptide"
MALPVTALLLPLALLLHAARPEIQLQQSGAELVKPGASVKLSCTGSGFNIEDYYIHWVKQRTEQGLEWIGRIDPENDETKYGPIFQGRATITADTSSNTVYLQLSSLTSEDTAVYYCAFRGGVYWGPGTTLTVSSGGGGSGGGGSGGGGSHMDVVMTQSPLTLSVAIGQSASISCKSSQSLLDSDGKTYLNWLLQRPGQSPKRLISLVSKLDSGVPDRFTGSGSGTDFTLRISRVEAEDLGIYYCWQGTHFPGTFGGGTKLEIKTTTPAPRPPTPAPTIASQPLSLRPEACRPAAGGAVHTRGLDFACDIYIWAPLAGTCGVLLLSLVITLYCKRGRKKLLYIFKQPFMRPVQTTQEEDGCSCRFPEEEEGGCELRVKFSRSADAPAYKQGQNQLYNELNLGRREEYDVLDKRRGRDPEMGGKPRRKNPQEGLYNELQKDKMAEAYSEIGMKGERRRGKGHDGLYQGLSTATKDTYDALHMQALPPR

SEQ ID NO: 1091-1094 - skipped (4 entries)

SEQ ID NO: 1095 - DNA, 1452 bp, Artificial Sequence
  source: /note="Description of Artificial Sequence: Synthetic polynucleotide"
atggccctccctgtcaccgccctgctgcttccgctggctcttctgctccacgccgctcggcccgatatccaaatgactcagagcccttcatccctgagcgccagcgtcggagacagggtgaccatcacgtgccgggcatcccaaggcattagaaataacttggcgtggtatcagcaaaaaccaggaaaggccccgaagcgcctgatctacgcggcctccaaccttcagtcaggagtgccctcgcgcttcaccgggagcggtagcggaactgagtttacccttatcgtgtcgtccctgcagccagaggacttcgcgacctactactgcctccagcatcactcgtacccgttgacttcgggaggcggaaccaaggtcgaaatcaaacgcactggctcgacgtcagggtccggtaaaccgggatcgggagaaggatcggaagtccaagtgctggagagcggaggcggactcgtgcaacctggcgggtcgctgcggctcagctgtgccgcgtcgggttttactttcagctcgtacgctatgtcatgggtgcggcaggctccgggaaaggggctggaatgggtgtccgctatttccggctcgggtggaagcaccaattacgccgactccgtgaagggacgcttcaccatctcacgggataactccaagaatactctgtacctccagatgaactcgctgagagccgaggacaccgcagtgtactactgcgcagggtcaagcggctggtccgaatactggggacagggcaccctcgtcactgtcagctccaccactaccccagcaccgaggccacccaccccggctcctaccatcgcctcccagcctctgtccctgcgtccggaggcatgtagacccgcagctggtggggccgtgcatacccggggtcttgacttcgcctgcgatatctacatttgggcccctctggctggtacttgcggggtcctgctgctttcactcgtgatcactctttactgtaagcgcggtcggaagaagctgctgtacatctttaagcaacccttcatgaggcctgtgcagactactcaagaggaggacggctgttcatgccggttcccagaggaggaggaaggcggctgcgaactgcgcgtgaaattcagccgcagcgcagatgctccagcctacaagcaggggcagaaccagctctacaacgaactcaatcttggtcggagagaggagtacgacgtgctggacaagcggagaggacgggacccagaaatgggcgggaagccgcgcagaaagaatccccaagagggcctgtacaacgagctccaaaaggataagatggcagaagcctatagcgagattggtatgaaaggggaacgcagaagaggcaaaggccacgacggactgtaccagggactcagcaccgccaccaaggacacctatgacgctcttcacatgcaggccctgccgcctcgg

SEQ ID NO: 1096 - protein, 484 aa, Artificial Sequence
  source: /note="Description of Artificial Sequence: Synthetic polypeptide"
MALPVTALLLPLALLLHAARPDIQMTQSPSSLSASVGDRVTITCRASQGIRNNLAWYQQKPGKAPKRLIYAASNLQSGVPSRFTGSGSGTEFTLIVSSLQPEDFATYYCLQHHSYPLTSGGGTKVEIKRTGSTSGSGKPGSGEGSEVQVLESGGGLVQPGGSLRLSCAASGFTFSSYAMSWVRQAPGKGLEWVSAISGSGGSTNYADSVKGRFTISRDNSKNTLYLQMNSLRAEDTAVYYCAGSSGWSEYWGQGTLVTVSSTTTPAPRPPTPAPTIASQPLSLRPEACRPAAGGAVHTRGLDFACDIYIWAPLAGTCGVLLLSLVITLYCKRGRKKLLYIFKQPFMRPVQTTQEEDGCSCRFPEEEEGGCELRVKFSRSADAPAYKQGQNQLYNELNLGRREEYDVLDKRRGRDPEMGGKPRRKNPQEGLYNELQKDKMAEAYSEIGMKGERRRGKGHDGLYQGLSTATKDTYDALHMQALPPR

SEQ ID NO: 1097-1500 - skipped (404 entries)

SEQ ID NO: 1501 - protein, 11 aa, Artificial Sequence
  source: /note="Description of Artificial Sequence: Synthetic peptide"
RASQSISTYLN

SEQ ID NO: 1502-2038 - skipped (537 entries)

SEQ ID NO: 2039 - DNA, 1461 bp, Artificial Sequence
  source: /note="Description of Artificial Sequence: Synthetic polynucleotide"
atggccctccctgtcaccgccctgctgcttccgctggctcttctgctccacgccgctcggccccaagtccaactcgtccagtcaggagcggaagtcaagaagcccggagcgtcagtcaaagtgtcatgcaaagcctcgggctacactttcactgggtactacatgcactgggtgcgccaggctccaggacagggactggaatggatgggatggatcaacccgaactccggtggcaccaattacgcccagaagttccaggggagggtgaccatgactcgcgacacgtcgatcagcaccgcatacatggagctgtcaagactccggtccgacgatactgccgtgtactactgcgcacgggacatgaacattctggccaccgtgccttttgacatctggggtcagggaactatggttaccgtgtcctctggtggaggcggctccggcggggggggaagcggaggcggtggaagcgacattcagatgacccagtcgccttcatccctttcggcgagcgtgggagatcgcgtcactatcacttgtcgggcctcgcagtccatctccacctacctcaattggtaccagcagaagccaggaaaagcaccgaatctgctgatctacgccgcgttttccttgcaatcgggagtgccaagcagattcagcggatcgggatcaggcactgatttcaccctcaccatcaactcgctgcaaccggaggatttcgctacgtactattgccaacaaggagacagcgtgccgctcaccttcggcggagggactaagctggaaatcaagaccactaccccagcaccgaggccacccaccccggctcctaccatcgcctcccagcctctgtccctgcgtccggaggcatgtagacccgcagctggtggggccgtgcatacccggggtcttgacttcgcctgcgatatctacatttgggcccctctggctggtacttgcggggtcctgctgctttcactcgtgatcactctttactgtaagcgcggtcggaagaagctgctgtacatctttaagcaacccttcatgaggcctgtgcagactactcaagaggaggacggctgttcatgccggttcccagaggaggaggaaggcggctgcgaactgcgcgtgaaattcagccgcagcgcagatgctccagcctacaagcaggggcagaaccagctctacaacgaactcaatcttggtcggagagaggagtacgacgtgctggacaagcggagaggacgggacccagaaatgggcgggaagccgcgcagaaagaatccccaagagggcctgtacaacgagctccaaaaggataagatggcagaagcctatagcgagattggtatgaaaggggaacgcagaagaggcaaaggccacgacggactgtaccagggactcagcaccgccaccaaggacacctatgacgctcttcacatgcaggccctgccgcctcgg

SEQ ID NO: 2040 - DNA, 1461 bp, Artificial Sequence
  source: /note="Description of Artificial Sequence: Synthetic polynucleotide"
atggccctccctgtcaccgccctgctgcttccgctggctcttctgctccacgccgctcggccccaagtgcaactcgtccaaagcggagcggaagtcaagaaacccggagcgagcgtgaaagtgtcctgcaaagcctccggctacacctttacgggctactacatgcactgggtgcgccaggcaccaggacagggtcttgaatggatgggatggatcaaccctaattcgggcggaactaactacgcacagaagttccaggggagagtgactctgactcgggatacctccatctcaactgtctacatggaactctcccgcttgcggtcagatgatacggcagtgtactactgcgcccgcgacatgaatatcctggctaccgtgccgttcgacatctggggacaggggactatggttactgtctcatcgggcggtggaggttcaggaggaggcggctcgggaggcggaggttcggacattcagatgacccagtccccatcctctctgtcggccagcgtcggagatagggtgaccattacctgtcgggcctcgcaaagcatctcctcgtacctcaactggtatcagcaaaagccgggaaaggcgcctaagctgctgatctacgccgcttcgagcttgcaaagcggggtgccatccagattctcgggatcaggctcaggaaccgacttcaccctgaccgtgaacagcctccagccggaggactttgccacttactactgccagcagggagactccgtgccgcttactttcggggggggtacccgcctggagatcaagaccactaccccagcaccgaggccacccaccccggctcctaccatcgcctcccagcctctgtccctgcgtccggaggcatgtagacccgcagctggtggggccgtgcatacccggggtcttgacttcgcctgcgatatctacatttgggcccctctggctggtacttgcggggtcctgctgctttcactcgtgatcactctttactgtaagcgcggtcggaagaagctgctgtacatctttaagcaacccttcatgaggcctgtgcagactactcaagaggaggacggctgttcatgccggttcccagaggaggaggaaggcggctgcgaactgcgcgtgaaattcagccgcagcgcagatgctccagcctacaagcaggggcagaaccagctctacaacgaactcaatcttggtcggagagaggagtacgacgtgctggacaagcggagaggacgggacccagaaatgggcgggaagccgcgcagaaagaatccccaagagggcctgtacaacgagctccaaaaggataagatggcagaagcctatagcgagattggtatgaaaggggaacgcagaagaggcaaaggccacgacggactgtaccagggactcagcaccgccaccaaggacacctatgacgctcttcacatgcaggccctgccgcctcgg

SEQ ID NO: 2041 - DNA, 1461 bp, Artificial Sequence
  source: /note="Description of Artificial Sequence: Synthetic polynucleotide"
atggccctccctgtcaccgccctgctgcttccgctggctcttctgctccacgccgctcggccccaagtccaactcgttcaatccggcgcagaagtcaagaagccaggagcatcagtgaaagtgtcctgcaaagcctcaggctacatcttcacgggatactacatccactgggtgcgccaggctccgggccagggccttgagtggatgggctggatcaaccctaactctgggggaaccaactacgctcagaagttccaggggagggtcactatgactcgcgatacctccatctccactgcgtacatggaactctcgggactgagatccgacgatcctgccgtgtactactgcgcccgggacatgaacatcttggcgaccgtgccgtttgacatttggggacagggcaccctcgtcactgtgtcgagcggtggaggaggctcggggggtggcggatcaggagggggaggaagcgacatccagctgactcagagcccatcgtcgttgtccgcgtcggtgggggatagagtgaccattacttgccgcgccagccagagcatctcatcatatctgaattggtaccagcagaagcccggaaaggccccaaaactgctgatctacgctgcaagcagcctccaatcgggagtgccgtcacggttctccgggtccggttcgggaactgactttaccctgaccgtgaattcgctgcaaccggaggatttcgccacgtactactgtcagcaaggagactccgtgccgctgaccttcggtggaggcaccaaggtcgaaatcaagaccactaccccagcaccgaggccacccaccccggctcctaccatcgcctcccagcctctgtccctgcgtccggaggcatgtagacccgcagctggtggggccgtgcatacccggggtcttgacttcgcctgcgatatctacatttgggcccctctggctggtacttgcggggtcctgctgctttcactcgtgatcactctttactgtaagcgcggtcggaagaagctgctgtacatctttaagcaacccttcatgaggcctgtgcagactactcaagaggaggacggctgttcatgccggttcccagaggaggaggaaggcggctgcgaactgcgcgtgaaattcagccgcagcgcagatgctccagcctacaagcaggggcagaaccagctctacaacgaactcaatcttggtcggagagaggagtacgacgtgctggacaagcggagaggacgggacccagaaatgggcgggaagccgcgcagaaagaatccccaagagggcctgtacaacgagctccaaaaggataagatggcagaagcctatagcgagattggtatgaaaggggaacgcagaagaggcaaaggccacgacggactgtaccagggactcagcaccgccaccaaggacacctatgacgctcttcacatgcaggccctgccgcctcgg

SEQ ID NO: 2042 - DNA, 1467 bp, Artificial Sequence
  source: /note="Description of Artificial Sequence: Synthetic polynucleotide"
atggccctccctgtcaccgccctgctgcttccgctggctcttctgctccacgccgctcggccccaagtccaactccaacagtcaggcgcagaagtgaaaaagagcggtgcatcggtgaaagtgtcatgcaaagcctcgggctacaccttcactgactactatatgcactggctgcggcaggcaccgggacagggacttgagtggatgggatggatcaacccgaattcaggggacactaactacgcgcagaagttccaggggagagtgaccctgacgagggacacctcaatttcgaccgtctacatggaattgtcgcgcctgagatcggacgatactgctgtgtactactgtgcccgcgacatgaacatcctcgcgactgtgccttttgatatctggggacaggggactatggtcaccgtttcctccgcttccggtggcggaggctcgggaggccgggcctccggtggaggaggcagcgacatccagatgactcagagcccttcctcgctgagcgcctcagtgggagatcgcgtgaccatcacttgccgggccagccagtccatttcgtcctacctcaattggtaccagcagaagccgggaaaggcgcccaagctcttgatctacgctgcgagctccctgcaaagcggggtgccgagccgattctcgggttccggctcgggaaccgacttcactctgaccatctcatccctgcaaccagaggactttgccacctactactgccaacaaggagattctgtcccactgacgttcggcggaggaaccaaggtcgaaatcaagaccactaccccagcaccgaggccacccaccccggctcctaccatcgcctcccagcctctgtccctgcgtccggaggcatgtagacccgcagctggtggggccgtgcatacccggggtcttgacttcgcctgcgatatctacatttgggcccctctggctggtacttgcggggtcctgctgctttcactcgtgatcactctttactgtaagcgcggtcggaagaagctgctgtacatctttaagcaacccttcatgaggcctgtgcagactactcaagaggaggacggctgttcatgccggttcccagaggaggaggaaggcggctgcgaactgcgcgtgaaattcagccgcagcgcagatgctccagcctacaagcaggggcagaaccagctctacaacgaactcaatcttggtcggagagaggagtacgacgtgctggacaagcggagaggacgggacccagaaatgggcgggaagccgcgcagaaagaatccccaagagggcctgtacaacgagctccaaaaggataagatggcagaagcctatagcgagattggtatgaaaggggaacgcagaagaggcaaaggccacgacggactgtaccagggactcagcaccgccaccaaggacacctatgacgctcttcacatgcaggccctgccgcctcgg

SEQ ID NO: 2043-2065 - skipped (23 entries)

SEQ ID NO: 2066 - DNA, 1458 bp, Artificial Sequence
  source: /note="Description of Artificial Sequence: Synthetic polynucleotide"
atggccctccctgtcaccgccctgctgcttccgctggctcttctgctccacgccgctcggccccaagtgcagctggtccagtcgggagccgaagtcaagaagcccggcgctagcgtgaaagtgtcctgcaaagcctccgggtacacattcacctcctactggatgaattgggtcagacaggcgcccggccagggactcgagtggatgggaaggattgatccttacgactccgaaacccattacaaccagaagttcaaggaccgcgtgaccatgactgtggataagtccacttccaccgcttacatggagctgtccagcctgcgctccgaggataccgcagtgtactactgcgcccggggaaactgggacgactattggggacagggaactaccgtgaccgtgtcaagcgggggtggcggtagcggaggagggggctccggcggcggcggctcagggggcggaggaagcgacgtgcagctcacccagtcgccctcatttctgtcggcctcagtgggagacagagtgaccattacttgtcgggcctccaagagcatctccaaggacctggcctggtatcagcagaagccaggaaaggcgcctaagttgctcatctactcggggtcgaccctgcaatctggcgtgccgtcccggttctccggttcgggaagcggtaccgaattcacccttactatctcctccctgcaaccggaggacttcgccacctactactgccaacagcacaacaagtacccgtacactttcgggggtggcacgaaggtcgaaatcaagaccactaccccagcaccgaggccacccaccccggctcctaccatcgcctcccagcctctgtccctgcgtccggaggcatgtagacccgcagctggtggggccgtgcatacccggggtcttgacttcgcctgcgatatctacatttgggcccctctggctggtacttgcggggtcctgctgctttcactcgtgatcactctttactgtaagcgcggtcggaagaagctgctgtacatctttaagcaacccttcatgaggcctgtgcagactactcaagaggaggacggctgttcatgccggttcccagaggaggaggaaggcggctgcgaactgcgcgtgaaattcagccgcagcgcagatgctccagcctacaagcaggggcagaaccagctctacaacgaactcaatcttggtcggagagaggagtacgacgtgctggacaagcggagaggacgggacccagaaatgggcgggaagccgcgcagaaagaatccccaagagggcctgtacaacgagctccaaaaggataagatggcagaagcctatagcgagattggtatgaaaggggaacgcagaagaggcaaaggccacgacggactgtaccagggactcagcaccgccaccaaggacacctatgacgctcttcacatgcaggccctgccgcctcgg

SEQ ID NO: 2067 - DNA, 1458 bp, Artificial Sequence
  source: /note="Description of Artificial Sequence: Synthetic polynucleotide"
atggccctccctgtcaccgccctgctgcttccgctggctcttctgctccacgccgctcggccccaagtgcagctggtccagtcgggagccgaagtcaagaagcccggcgctagcgtgaaagtgtcctgcaaagcctccgggtacacattcacctcctactggatgaattgggtcagacaggcgcccggccagggactcgagtggatgggaaggattgatccttacgactccgaaacccattacaaccagaagttcaaggaccgcgtgaccatgactgtggataagtccacttccaccgcttacatggagctgtccagcctgcgctccgaggataccgcagtgtactactgcgcccggggaaactgggacgactattggggacagggaactaccgtgaccgtgtcaagcgggggtggcggtagcggaggagggggctccggcggcggcggctcagggggcggaggaagcgaagtggtgctgacccagtcgcccgcaaccctctctctgtcgccgggagaacgcgccactctttcctgtcgggcgtccaagagcatctcaaaggacctcgcctggtaccagcagaagcctggtcaagccccgcggctgctgatctactccggctccacgctgcaatcaggaatcccagccagattttccggttcggggtcggggactgacttcaccttgaccattagctcgctggaacctgaggacttcgccgtgtattactgccagcagcacaacaagtacccgtacaccttcggaggcggtactaaggtcgagatcaagaccactaccccagcaccgaggccacccaccccggctcctaccatcgcctcccagcctctgtccctgcgtccggaggcatgtagacccgcagctggtggggccgtgcatacccggggtcttgacttcgcctgcgatatctacatttgggcccctctggctggtacttgcggggtcctgctgctttcactcgtgatcactctttactgtaagcgcggtcggaagaagctgctgtacatctttaagcaacccttcatgaggcctgtgcagactactcaagaggaggacggctgttcatgccggttcccagaggaggaggaaggcggctgcgaactgcgcgtgaaattcagccgcagcgcagatgctccagcctacaagcaggggcagaaccagctctacaacgaactcaatcttggtcggagagaggagtacgacgtgctggacaagcggagaggacgggacccagaaatgggcgggaagccgcgcagaaagaatccccaagagggcctgtacaacgagctccaaaaggataagatggcagaagcctatagcgagattggtatgaaaggggaacgcagaagaggcaaaggccacgacggactgtaccagggactcagcaccgccaccaaggacacctatgacgctcttcacatgcaggccctgccgcctcgg

SEQ ID NO: 2068 - DNA, 1458 bp, Artificial Sequence
  source: /note="Description of Artificial Sequence: Synthetic polynucleotide"
atggccctccctgtcaccgccctgctgcttccgctggctcttctgctccacgccgctcggccccaagtgcagctggtccagtcgggagccgaagtcaagaagcccggcgctagcgtgaaagtgtcctgcaaagcctccgggtacacattcacctcctactggatgaattgggtcagacaggcgcccggccagggactcgagtggatgggaaggattgatccttacgactccgaaacccattacaaccagaagttcaaggaccgcgtgaccatgactgtggataagtccacttccaccgcttacatggagctgtccagcctgcgctccgaggataccgcagtgtactactgcgcccggggaaactgggacgactattggggacagggaactaccgtgaccgtgtcaagcgggggtggcggtagcggaggagggggctccggcggcggcggctcagggggcggaggaagcgacgtcgtgatgacccagtcaccggcattcctgtccgtgactcccggagaaaaggtcacgattacttgccgggcgtccaagagcatctccaaggacctcgcctggtaccaacagaagccggaccaggcccctaagctgttgatctactcggggtccacccttcaatcgggagtgccatcgcggtttagcggttcgggttctgggaccgacttcactttcaccatctcctcactggaagccgaggatgccgccacttactactgtcagcagcacaacaagtatccgtacaccttcggaggcggtaccaaagtggagatcaagaccactaccccagcaccgaggccacccaccccggctcctaccatcgcctcccagcctctgtccctgcgtccggaggcatgtagacccgcagctggtggggccgtgcatacccggggtcttgacttcgcctgcgatatctacatttgggcccctctggctggtacttgcggggtcctgctgctttcactcgtgatcactctttactgtaagcgcggtcggaagaagctgctgtacatctttaagcaacccttcatgaggcctgtgcagactactcaagaggaggacggctgttcatgccggttcccagaggaggaggaaggcggctgcgaactgcgcgtgaaattcagccgcagcgcagatgctccagcctacaagcaggggcagaaccagctctacaacgaactcaatcttggtcggagagaggagtacgacgtgctggacaagcggagaggacgggacccagaaatgggcgggaagccgcgcagaaagaatccccaagagggcctgtacaacgagctccaaaaggataagatggcagaagcctatagcgagattggtatgaaaggggaacgcagaagaggcaaaggccacgacggactgtaccagggactcagcaccgccaccaaggacacctatgacgctcttcacatgcaggccctgccgcctcgg

SEQ ID NO: 2069 - DNA, 1458 bp, Artificial Sequence
  source: /note="Description of Artificial Sequence: Synthetic polynucleotide"
atggccctccctgtcaccgccctgctgcttccgctggctcttctgctccacgccgctcggccccaagtgcagctggtccagtcgggagccgaagtcaagaagcccggcgctagcgtgaaagtgtcctgcaaagcctccgggtacacattcacctcctactggatgaattgggtcagacaggcgcccggccagggactcgagtggatgggaaggattgatccttacgactccgaaacccattacaaccagaagttcaaggaccgcgtgaccatgactgtggataagtccacttccaccgcttacatggagctgtccagcctgcgctccgaggataccgcagtgtactactgcgcccggggaaactgggacgactattggggacagggaactaccgtgaccgtgtcaagcgggggtggcggtagcggaggagggggctccggcggcggcggctcagggggcggaggaagcgacgtggtcatgactcagtccccggactcactcgcggtgtcgcttggagagagagcgaccatcaactgtcgggcctcaaagagcatcagcaaggacctggcctggtaccagcagaagccgggacagccgccaaagctgctgatctactccgggtccaccttgcaatctggtgtccctgaccggttctccggttccgggtcgggtaccgacttcacgctcactatttcgtcgctgcaagccgaagatgtggccgtgtactattgccaacagcacaacaagtacccctacacttttggcggaggcaccaaggtggaaatcaagaccactaccccagcaccgaggccacccaccccggctcctaccatcgcctcccagcctctgtccctgcgtccggaggcatgtagacccgcagctggtggggccgtgcatacccggggtcttgacttcgcctgcgatatctacatttgggcccctctggctggtacttgcggggtcctgctgctttcactcgtgatcactctttactgtaagcgcggtcggaagaagctgctgtacatctttaagcaacccttcatgaggcctgtgcagactactcaagaggaggacggctgttcatgccggttcccagaggaggaggaaggcggctgcgaactgcgcgtgaaattcagccgcagcgcagatgctccagcctacaagcaggggcagaaccagctctacaacgaactcaatcttggtcggagagaggagtacgacgtgctggacaagcggagaggacgggacccagaaatgggcgggaagccgcgcagaaagaatccccaagagggcctgtacaacgagctccaaaaggataagatggcagaagcctatagcgagattggtatgaaaggggaacgcagaagaggcaaaggccacgacggactgtaccagggactcagcaccgccaccaaggacacctatgacgctcttcacatgcaggccctgccgcctcgg

SEQ ID NO: 2070 - DNA, 1458 bp, Artificial Sequence
  source: /note="Description of Artificial Sequence: Synthetic polynucleotide"
atggccctccctgtcaccgccctgctgcttccgctggctcttctgctccacgccgctcggcccgacgtgcagctcacccagtcgccctcatttctgtcggcctcagtgggagacagagtgaccattacttgtcgggcctccaagagcatctccaaggacctggcctggtatcagcagaagccaggaaaggcgcctaagttgctcatctactcggggtcgaccctgcaatctggcgtgccgtcccggttctccggttcgggaagcggtaccgaattcacccttactatctcctccctgcaaccggaggacttcgccacctactactgccaacagcacaacaagtacccgtacactttcgggggtggcacgaaggtcgaaatcaaggggggtggcggtagcggaggagggggctccggcggcggcggctcagggggcggaggaagccaagtgcagctggtccagtcgggagccgaagtcaagaagcccggcgctagcgtgaaagtgtcctgcaaagcctccgggtacacattcacctcctactggatgaattgggtcagacaggcgcccggccagggactcgagtggatgggaaggattgatccttacgactccgaaacccattacaaccagaagttcaaggaccgcgtgaccatgactgtggataagtccacttccaccgcttacatggagctgtccagcctgcgctccgaggataccgcagtgtactactgcgcccggggaaactgggacgactattggggacagggaactaccgtgaccgtgtcaagcaccactaccccagcaccgaggccacccaccccggctcctaccatcgcctcccagcctctgtccctgcgtccggaggcatgtagacccgcagctggtggggccgtgcatacccggggtcttgacttcgcctgcgatatctacatttgggcccctctggctggtacttgcggggtcctgctgctttcactcgtgatcactctttactgtaagcgcggtcggaagaagctgctgtacatctttaagcaacccttcatgaggcctgtgcagactactcaagaggaggacggctgttcatgccggttcccagaggaggaggaaggcggctgcgaactgcgcgtgaaattcagccgcagcgcagatgctccagcctacaagcaggggcagaaccagctctacaacgaactcaatcttggtcggagagaggagtacgacgtgctggacaagcggagaggacgggacccagaaatgggcgggaagccgcgcagaaagaatccccaagagggcctgtacaacgagctccaaaaggataagatggcagaagcctatagcgagattggtatgaaaggggaacgcagaagaggcaaaggccacgacggactgtaccagggactcagcaccgccaccaaggacacctatgacgctcttcacatgcaggccctgccgcctcgg

SEQ ID NO: 2071 - DNA, 1458 bp, Artificial Sequence
  source: /note="Description of Artificial Sequence: Synthetic polynucleotide"
atggccctccctgtcaccgccctgctgcttccgctggctcttctgctccacgccgctcggcccgaagtggtgctgacccagtcgcccgcaaccctctctctgtcgccgggagaacgcgccactctttcctgtcgggcgtccaagagcatctcaaaggacctcgcctggtaccagcagaagcctggtcaagccccgcggctgctgatctactccggctccacgctgcaatcaggaatcccagccagattttccggttcggggtcggggactgacttcaccttgaccattagctcgctggaacctgaggacttcgccgtgtattactgccagcagcacaacaagtacccgtacaccttcggaggcggtactaaggtcgagatcaaggggggtggcggtagcggaggagggggctccggcggcggcggctcagggggcggaggaagccaagtgcagctggtccagtcgggagccgaagtcaagaagcccggcgctagcgtgaaagtgtcctgcaaagcctccgggtacacattcacctcctactggatgaattgggtcagacaggcgcccggccagggactcgagtggatgggaaggattgatccttacgactccgaaacccattacaaccagaagttcaaggaccgcgtgaccatgactgtggataagtccacttccaccgcttacatggagctgtccagcctgcgctccgaggataccgcagtgtactactgcgcccggggaaactgggacgactattggggacagggaactaccgtgaccgtgtcaagcaccactaccccagcaccgaggccacccaccccggctcctaccatcgcctcccagcctctgtccctgcgtccggaggcatgtagacccgcagctggtggggccgtgcatacccggggtcttgacttcgcctgcgatatctacatttgggcccctctggctggtacttgcggggtcctgctgctttcactcgtgatcactctttactgtaagcgcggtcggaagaagctgctgtacatctttaagcaacccttcatgaggcctgtgcagactactcaagaggaggacggctgttcatgccggttcccagaggaggaggaaggcggctgcgaactgcgcgtgaaattcagccgcagcgcagatgctccagcctacaagcaggggcagaaccagctctacaacgaactcaatcttggtcggagagaggagtacgacgtgctggacaagcggagaggacgggacccagaaatgggcgggaagccgcgcagaaagaatccccaagagggcctgtacaacgagctccaaaaggataagatggcagaagcctatagcgagattggtatgaaaggggaacgcagaagaggcaaaggccacgacggactgtaccagggactcagcaccgccaccaaggacacctatgacgctcttcacatgcaggccctgccgcctcgg

SEQ ID NO: 2072 - DNA, 1458 bp, Artificial Sequence
  source: /note="Description of Artificial Sequence: Synthetic polynucleotide"
atggccctccctgtcaccgccctgctgcttccgctggctcttctgctccacgccgctcggcccgacgtcgtgatgacccagtcaccggcattcctgtccgtgactcccggagaaaaggtcacgattacttgccgggcgtccaagagcatctccaaggacctcgcctggtaccaacagaagccggaccaggcccctaagctgttgatctactcggggtccacccttcaatcgggagtgccatcgcggtttagcggttcgggttctgggaccgacttcactttcaccatctcctcactggaagccgaggatgccgccacttactactgtcagcagcacaacaagtatccgtacaccttcggaggcggtaccaaagtggagatcaaggggggtggcggtagcggaggagggggctccggcggcggcggctcagggggcggaggaagccaagtgcagctggtccagtcgggagccgaagtcaagaagcccggcgctagcgtgaaagtgtcctgcaaagcctccgggtacacattcacctcctactggatgaattgggtcagacaggcgcccggccagggactcgagtggatgggaaggattgatccttacgactccgaaacccattacaaccagaagttcaaggaccgcgtgaccatgactgtggataagtccacttccaccgcttacatggagctgtccagcctgcgctccgaggataccgcagtgtactactgcgcccggggaaactgggacgactattggggacagggaactaccgtgaccgtgtcaagcaccactaccccagcaccgaggccacccaccccggctcctaccatcgcctcccagcctctgtccctgcgtccggaggcatgtagacccgcagctggtggggccgtgcatacccggggtcttgacttcgcctgcgatatctacatttgggcccctctggctggtacttgcggggtcctgctgctttcactcgtgatcactctttactgtaagcgcggtcggaagaagctgctgtacatctttaagcaacccttcatgaggcctgtgcagactactcaagaggaggacggctgttcatgccggttcccagaggaggaggaaggcggctgcgaactgcgcgtgaaattcagccgcagcgcagatgctccagcctacaagcaggggcagaaccagctctacaacgaactcaatcttggtcggagagaggagtacgacgtgctggacaagcggagaggacgggacccagaaatgggcgggaagccgcgcagaaagaatccccaagagggcctgtacaacgagctccaaaaggataagatggcagaagcctatagcgagattggtatgaaaggggaacgcagaagaggcaaaggccacgacggactgtaccagggactcagcaccgccaccaaggacacctatgacgctcttcacatgcaggccctgccgcctcgg

SEQ ID NO: 2073 - DNA, 1458 bp, Artificial Sequence
  source: /note="Description of Artificial Sequence: Synthetic polynucleotide"
atggccctccctgtcaccgccctgctgcttccgctggctcttctgctccacgccgctcggcccgacgtggtcatgactcagtccccggactcactcgcggtgtcgcttggagagagagcgaccatcaactgtcgggcctcaaagagcatcagcaaggacctggcctggtaccagcagaagccgggacagccgccaaagctgctgatctactccgggtccaccttgcaatctggtgtccctgaccggttctccggttccgggtcgggtaccgacttcacgctcactatttcgtcgctgcaagccgaagatgtggccgtgtactattgccaacagcacaacaagtacccctacacttttggcggaggcaccaaggtggaaatcaaggggggtggcggtagcggaggagggggctccggcggcggcggctcagggggcggaggaagccaagtgcagctggtccagtcgggagccgaagtcaagaagcccggcgctagcgtgaaagtgtcctgcaaagcctccgggtacacattcacctcctactggatgaattgggtcagacaggcgcccggccagggactcgagtggatgggaaggattgatccttacgactccgaaacccattacaaccagaagttcaaggaccgcgtgaccatgactgtggataagtccacttccaccgcttacatggagctgtccagcctgcgctccgaggataccgcagtgtactactgcgcccggggaaactgggacgactattggggacagggaactaccgtgaccgtgtcaagcaccactaccccagcaccgaggccacccaccccggctcctaccatcgcctcccagcctctgtccctgcgtccggaggcatgtagacccgcagctggtggggccgtgcatacccggggtcttgacttcgcctgcgatatctacatttgggcccctctggctggtacttgcggggtcctgctgctttcactcgtgatcactctttactgtaagcgcggtcggaagaagctgctgtacatctttaagcaacccttcatgaggcctgtgcagactactcaagaggaggacggctgttcatgccggttcccagaggaggaggaaggcggctgcgaactgcgcgtgaaattcagccgcagcgcagatgctccagcctacaagcaggggcagaaccagctctacaacgaactcaatcttggtcggagagaggagtacgacgtgctggacaagcggagaggacgggacccagaaatgggcgggaagccgcgcagaaagaatccccaagagggcctgtacaacgagctccaaaaggataagatggcagaagcctatagcgagattggtatgaaaggggaacgcagaagaggcaaaggccacgacggactgtaccagggactcagcaccgccaccaaggacacctatgacgctcttcacatgcaggccctgccgcctcgg

SEQ ID NO: 2074 - DNA, 1458 bp, Artificial Sequence
  source: /note="Description of Artificial Sequence: Synthetic polynucleotide"
atggccctccctgtcaccgccctgctgcttccgctggctcttctgctccacgccgctcggccccaagtgcagctggtgcagtcaggcagcgaactgaagaagcccggagcctccgtcaaagtgtcctgcaaagcctcgggatacaccttcacctcctactggatgaactgggtccgccaggcacctggacaggggctggagtggatgggaaggatcgatccctacgattccgaaacccattacaatcagaagttcaaggaccggtttgtgttctccgtggacaagtccgtgtccaccgcctacctccaaattagcagcctgaaggcggaggatacagctgtctactactgcgctcgcggaaactgggatgactattggggccagggaactaccgtgactgtgtcctccgggggtggcggtagcggaggagggggctccggcggcggcggctcagggggcggaggaagcgacgtgcagctcacccagtcgccctcatttctgtcggcctcagtgggagacagagtgaccattacttgtcgggcctccaagagcatctccaaggacctggcctggtatcagcagaagccaggaaaggcgcctaagttgctcatctactcggggtcgaccctgcaatctggcgtgccgtcccggttctccggttcgggaagcggtaccgaattcacccttactatctcctccctgcaaccggaggacttcgccacctactactgccaacagcacaacaagtacccgtacactttcgggggtggcacgaaggtcgaaatcaagaccactaccccagcaccgaggccacccaccccggctcctaccatcgcctcccagcctctgtccctgcgtccggaggcatgtagacccgcagctggtggggccgtgcatacccggggtcttgacttcgcctgcgatatctacatttgggcccctctggctggtacttgcggggtcctgctgctttcactcgtgatcactctttactgtaagcgcggtcggaagaagctgctgtacatctttaagcaacccttcatgaggcctgtgcagactactcaagaggaggacggctgttcatgccggttcccagaggaggaggaaggcggctgcgaactgcgcgtgaaattcagccgcagcgcagatgctccagcctacaagcaggggcagaaccagctctacaacgaactcaatcttggtcggagagaggagtacgacgtgctggacaagcggagaggacgggacccagaaatgggcgggaagccgcgcagaaagaatccccaagagggcctgtacaacgagctccaaaaggataagatggcagaagcctatagcgagattggtatgaaaggggaacgcagaagaggcaaaggccacgacggactgtaccagggactcagcaccgccaccaaggacacctatgacgctcttcacatgcaggccctgccgcctcgg

SEQ ID NO: 2075 - DNA, 1458 bp, Artificial Sequence
  source: /note="Description of Artificial Sequence: Synthetic polynucleotide"
atggccctccctgtcaccgccctgctgcttccgctggctcttctgctccacgccgctcggccccaagtgcagctggtgcagtcaggcagcgaactgaagaagcccggagcctccgtcaaagtgtcctgcaaagcctcgggatacaccttcacctcctactggatgaactgggtccgccaggcacctggacaggggctggagtggatgggaaggatcgatccctacgattccgaaacccattacaatcagaagttcaaggaccggtttgtgttctccgtggacaagtccgtgtccaccgcctacctccaaattagcagcctgaaggcggaggatacagctgtctactactgcgctcgcggaaactgggatgactattggggccagggaactaccgtgactgtgtcctccgggggtggcggtagcggaggagggggctccggcggcggcggctcagggggcggaggaagcgaagtggtgctgacccagtcgcccgcaaccctctctctgtcgccgggagaacgcgccactctttcctgtcgggcgtccaagagcatctcaaaggacctcgcctggtaccagcagaagcctggtcaagccccgcggctgctgatctactccggctccacgctgcaatcaggaatcccagccagattttccggttcggggtcggggactgacttcaccttgaccattagctcgctggaacctgaggacttcgccgtgtattactgccagcagcacaacaagtacccgtacaccttcggaggcggtactaaggtcgagatcaagaccactaccccagcaccgaggccacccaccccggctcctaccatcgcctcccagcctctgtccctgcgtccggaggcatgtagacccgcagctggtggggccgtgcatacccggggtcttgacttcgcctgcgatatctacatttgggcccctctggctggtacttgcggggtcctgctgctttcactcgtgatcactctttactgtaagcgcggtcggaagaagctgctgtacatctttaagcaacccttcatgaggcctgtgcagactactcaagaggaggacggctgttcatgccggttcccagaggaggaggaaggcggctgcgaactgcgcgtgaaattcagccgcagcgcagatgctccagcctacaagcaggggcagaaccagctctacaacgaactcaatcttggtcggagagaggagtacgacgtgctggacaagcggagaggacgggacccagaaatgggcgggaagccgcgcagaaagaatccccaagagggcctgtacaacgagctccaaaaggataagatggcagaagcctatagcgagattggtatgaaaggggaacgcagaagaggcaaaggccacgacggactgtaccagggactcagcaccgccaccaaggacacctatgacgctcttcacatgcaggccctgccgcctcgg

SEQ ID NO: 2076 - DNA, 1458 bp, Artificial Sequence
  source: /note="Description of Artificial Sequence: Synthetic polynucleotide"
atggccctccctgtcaccgccctgctgcttccgctggctcttctgctccacgccgctcggccccaagtgcagctggtgcagtcaggcagcgaactgaagaagcccggagcctccgtcaaagtgtcctgcaaagcctcgggatacaccttcacctcctactggatgaactgggtccgccaggcacctggacaggggctggagtggatgggaaggatcgatccctacgattccgaaacccattacaatcagaagttcaaggaccggtttgtgttctccgtggacaagtccgtgtccaccgcctacctccaaattagcagcctgaaggcggaggatacagctgtctactactgcgctcgcggaaactgggatgactattggggccagggaactaccgtgactgtgtcctccgggggtggcggtagcggaggagggggctccggcggcggcggctcagggggcggaggaagcgacgtcgtgatgacccagtcaccggcattcctgtccgtgactcccggagaaaaggtcacgattacttgccgggcgtccaagagcatctccaaggacctcgcctggtaccaacagaagccggaccaggcccctaagctgttgatctactcggggtccacccttcaatcgggagtgccatcgcggtttagcggttcgggttctgggaccgacttcactttcaccatctcctcactggaagccgaggatgccgccacttactactgtcagcagcacaacaagtatccgtacaccttcggaggcggtaccaaagtggagatcaagaccactaccccagcaccgaggccacccaccccggctcctaccatcgcctcccagcctctgtccctgcgtccggaggcatgtagacccgcagctggtggggccgtgcatacccggggtcttgacttcgcctgcgatatctacatttgggcccctctggctggtacttgcggggtcctgctgctttcactcgtgatcactctttactgtaagcgcggtcggaagaagctgctgtacatctttaagcaacccttcatgaggcctgtgcagactactcaagaggaggacggctgttcatgccggttcccagaggaggaggaaggcggctgcgaactgcgcgtgaaattcagccgcagcgcagatgctccagcctacaagcaggggcagaaccagctctacaacgaactcaatcttggtcggagagaggagtacgacgtgctggacaagcggagaggacgggacccagaaatgggcgggaagccgcgcagaaagaatccccaagagggcctgtacaacgagctccaaaaggataagatggcagaagcctatagcgagattggtatgaaaggggaacgcagaagaggcaaaggccacgacggactgtaccagggactcagcaccgccaccaaggacacctatgacgctcttcacatgcaggccctgccgcctcgg

SEQ ID NO: 2077 - DNA, 1458 bp, Artificial Sequence
  source: /note="Description of Artificial Sequence: Synthetic polynucleotide"
atggccctccctgtcaccgccctgctgcttccgctggctcttctgctccacgccgctcggccccaagtgcagctggtgcagtcaggcagcgaactgaagaagcccggagcctccgtcaaagtgtcctgcaaagcctcgggatacaccttcacctcctactggatgaactgggtccgccaggcacctggacaggggctggagtggatgggaaggatcgatccctacgattccgaaacccattacaatcagaagttcaaggaccggtttgtgttctccgtggacaagtccgtgtccaccgcctacctccaaattagcagcctgaaggcggaggatacagctgtctactactgcgctcgcggaaactgggatgactattggggccagggaactaccgtgactgtgtcctccgggggtggcggtagcggaggagggggctccggcggcggcggctcagggggcggaggaagcgacgtggtcatgactcagtccccggactcactcgcggtgtcgcttggagagagagcgaccatcaactgtcgggcctcaaagagcatcagcaaggacctggcctggtaccagcagaagccgggacagccgccaaagctgctgatctactccgggtccaccttgcaatctggtgtccctgaccggttctccggttccgggtcgggtaccgacttcacgctcactatttcgtcgctgcaagccgaagatgtggccgtgtactattgccaacagcacaacaagtacccctacacttttggcggaggcaccaaggtggaaatcaagaccactaccccagcaccgaggccacccaccccggctcctaccatcgcctcccagcctctgtccctgcgtccggaggcatgtagacccgcagctggtggggccgtgcatacccggggtcttgacttcgcctgcgatatctacatttgggcccctctggctggtacttgcggggtcctgctgctttcactcgtgatcactctttactgtaagcgcggtcggaagaagctgctgtacatctttaagcaacccttcatgaggcctgtgcagactactcaagaggaggacggctgttcatgccggttcccagaggaggaggaaggcggctgcgaactgcgcgtgaaattcagccgcagcgcagatgctccagcctacaagcaggggcagaaccagctctacaacgaactcaatcttggtcggagagaggagtacgacgtgctggacaagcggagaggacgggacccagaaatgggcgggaagccgcgcagaaagaatccccaagagggcctgtacaacgagctccaaaaggataagatggcagaagcctatagcgagattggtatgaaaggggaacgcagaagaggcaaaggccacgacggactgtaccagggactcagcaccgccaccaaggacacctatgacgctcttcacatgcaggccctgccgcctcgg

SEQ ID NO: 2078 - DNA, 1458 bp, Artificial Sequence
  source: /note="Description of Artificial Sequence: Synthetic polynucleotide"
atggccctccctgtcaccgccctgctgcttccgctggctcttctgctccacgccgctcggcccgacgtgcagctcacccagtcgccctcatttctgtcggcctcagtgggagacagagtgaccattacttgtcgggcctccaagagcatctccaaggacctggcctggtatcagcagaagccaggaaaggcgcctaagttgctcatctactcggggtcgaccctgcaatctggcgtgccgtcccggttctccggttcgggaagcggtaccgaattcacccttactatctcctccctgcaaccggaggacttcgccacctactactgccaacagcacaacaagtacccgtacactttcgggggtggcacgaaggtcgaaatcaaggggggtggcggtagcggaggagggggctccggcggcggcggctcagggggcggaggaagccaagtgcagctggtgcagtcaggcagcgaactgaagaagcccggagcctccgtcaaagtgtcctgcaaagcctcgggatacaccttcacctcctactggatgaactgggtccgccaggcacctggacaggggctggagtggatgggaaggatcgatccctacgattccgaaacccattacaatcagaagttcaaggaccggtttgtgttctccgtggacaagtccgtgtccaccgcctacctccaaattagcagcctgaaggcggaggatacagctgtctactactgcgctcgcggaaactgggatgactattggggccagggaactaccgtgactgtgtcctccaccactaccccagcaccgaggccacccaccccggctcctaccatcgcctcccagcctctgtccctgcgtccggaggcatgtagacccgcagctggtggggccgtgcatacccggggtcttgacttcgcctgcgatatctacatttgggcccctctggctggtacttgcggggtcctgctgctttcactcgtgatcactctttactgtaagcgcggtcggaagaagctgctgtacatctttaagcaacccttcatgaggcctgtgcagactactcaagaggaggacggctgttcatgccggttcccagaggaggaggaaggcggctgcgaactgcgcgtgaaattcagccgcagcgcagatgctccagcctacaagcaggggcagaaccagctctacaacgaactcaatcttggtcggagagaggagtacgacgtgctggacaagcggagaggacgggacccagaaatgggcgggaagccgcgcagaaagaatccccaagagggcctgtacaacgagctccaaaaggataagatggcagaagcctatagcgagattggtatgaaaggggaacgcagaagaggcaaaggccacgacggactgtaccagggactcagcaccgccaccaaggacacctatgacgctcttcacatgcaggccctgccgcctcgg

SEQ ID NO: 2079 - DNA, 1458 bp, Artificial Sequence
  source: /note="Description of Artificial Sequence: Synthetic polynucleotide"
atggccctccctgtcaccgccctgctgcttccgctggctcttctgctccacgccgctcggcccgaagtggtgctgacccagtcgcccgcaaccctctctctgtcgccgggagaacgcgccactctttcctgtcgggcgtccaagagcatctcaaaggacctcgcctggtaccagcagaagcctggtcaagccccgcggctgctgatctactccggctccacgctgcaatcaggaatcccagccagattttccggttcggggtcggggactgacttcaccttgaccattagctcgctggaacctgaggacttcgccgtgtattactgccagcagcacaacaagtacccgtacaccttcggaggcggtactaaggtcgagatcaaggggggtggcggtagcggaggagggggctccggcggcggcggctcagggggcggaggaagccaagtgcagctggtgcagtcaggcagcgaactgaagaagcccggagcctccgtcaaagtgtcctgcaaagcctcgggatacaccttcacctcctactggatgaactgggtccgccaggcacctggacaggggctggagtggatgggaaggatcgatccctacgattccgaaacccattacaatcagaagttcaaggaccggtttgtgttctccgtggacaagtccgtgtccaccgcctacctccaaattagcagcctgaaggcggaggatacagctgtctactactgcgctcgcggaaactgggatgactattggggccagggaactaccgtgactgtgtcctccaccactaccccagcaccgaggccacccaccccggctcctaccatcgcctcccagcctctgtccctgcgtccggaggcatgtagacccgcagctggtggggccgtgcatacccggggtcttgacttcgcctgcgatatctacatttgggcccctctggctggtacttgcggggtcctgctgctttcactcgtgatcactctttactgtaagcgcggtcggaagaagctgctgtacatctttaagcaacccttcatgaggcctgtgcagactactcaagaggaggacggctgttcatgccggttcccagaggaggaggaaggcggctgcgaactgcgcgtgaaattcagccgcagcgcagatgctccagcctacaagcaggggcagaaccagctctacaacgaactcaatcttggtcggagagaggagtacgacgtgctggacaagcggagaggacgggacccagaaatgggcgggaagccgcgcagaaagaatccccaagagggcctgtacaacgagctccaaaaggataagatggcagaagcctatagcgagattggtatgaaaggggaacgcagaagaggcaaaggccacgacggactgtaccagggactcagcaccgccaccaaggacacctatgacgctcttcacatgcaggccctgccgcctcgg

SEQ ID NO: 2080 - DNA, 1458 bp, Artificial Sequence
  source: /note="Description of Artificial Sequence: Synthetic polynucleotide"
atggccctccctgtcaccgccctgctgcttccgctggctcttctgctccacgccgctcggcccgacgtcgtgatgacccagtcaccggcattcctgtccgtgactcccggagaaaaggtcacgattacttgccgggcgtccaagagcatctccaaggacctcgcctggtaccaacagaagccggaccaggcccctaagctgttgatctactcggggtccacccttcaatcgggagtgccatcgcggtttagcggttcgggttctgggaccgacttcactttcaccatctcctcactggaagccgaggatgccgccacttactactgtcagcagcacaacaagtatccgtacaccttcggaggcggtaccaaagtggagatcaaggggggtggcggtagcggaggagggggctccggcggcggcggctcagggggcggaggaagccaagtgcagctggtgcagtcaggcagcgaactgaagaagcccggagcctccgtcaaagtgtcctgcaaagcctcgggatacaccttcacctcctactggatgaactgggtccgccaggcacctggacaggggctggagtggatgggaaggatcgatccctacgattccgaaacccattacaatcagaagttcaaggaccggtttgtgttctccgtggacaagtccgtgtccaccgcctacctccaaattagcagcctgaaggcggaggatacagctgtctactactgcgctcgcggaaactgggatgactattggggccagggaactaccgtgactgtgtcctccaccactaccccagcaccgaggccacccaccccggctcctaccatcgcctcccagcctctgtccctgcgtccggaggcatgtagacccgcagctggtggggccgtgcatacccggggtcttgacttcgcctgcgatatctacatttgggcccctctggctggtacttgcggggtcctgctgctttcactcgtgatcactctttactgtaagcgcggtcggaagaagctgctgtacatctttaagcaacccttcatgaggcctgtgcagactactcaagaggaggacggctgttcatgccggttcccagaggaggaggaaggcggctgcgaactgcgcgtgaaattcagccgcagcgcagatgctccagcctacaagcaggggcagaaccagctctacaacgaactcaatcttggtcggagagaggagtacgacgtgctggacaagcggagaggacgggacccagaaatgggcgggaagccgcgcagaaagaatccccaagagggcctgtacaacgagctccaaaaggataagatggcagaagcctatagcgagattggtatgaaaggggaacgcagaagaggcaaaggccacgacggactgtaccagggactcagcaccgccaccaaggacacctatgacgctcttcacatgcaggccctgccgcctcgg

SEQ ID NO: 2081 - DNA, 1458 bp, Artificial Sequence
  source: /note="Description of Artificial Sequence: Synthetic polynucleotide"
atggccctccctgtcaccgccctgctgcttccgctggctcttctgctccacgccgctcggcccgacgtggtcatgactcagtccccggactcactcgcggtgtcgcttggagagagagcgaccatcaactgtcgggcctcaaagagcatcagcaaggacctggcctggtaccagcagaagccgggacagccgccaaagctgctgatctactccgggtccaccttgcaatctggtgtccctgaccggttctccggttccgggtcgggtaccgacttcacgctcactatttcgtcgctgcaagccgaagatgtggccgtgtactattgccaacagcacaacaagtacccctacacttttggcggaggcaccaaggtggaaatcaaggggggtggcggtagcggaggagggggctccggcggcggcggctcagggggcggaggaagccaagtgcagctggtgcagtcaggcagcgaactgaagaagcccggagcctccgtcaaagtgtcctgcaaagcctcgggatacaccttcacctcctactggatgaactgggtccgccaggcacctggacaggggctggagtggatgggaaggatcgatccctacgattccgaaacccattacaatcagaagttcaaggaccggtttgtgttctccgtggacaagtccgtgtccaccgcctacctccaaattagcagcctgaaggcggaggatacagctgtctactactgcgctcgcggaaactgggatgactattggggccagggaactaccgtgactgtgtcctccaccactaccccagcaccgaggccacccaccccggctcctaccatcgcctcccagcctctgtccctgcgtccggaggcatgtagacccgcagctggtggggccgtgcatacccggggtcttgacttcgcctgcgatatctacatttgggcccctctggctggtacttgcggggtcctgctgctttcactcgtgatcactctttactgtaagcgcggtcggaagaagctgctgtacatctttaagcaacccttcatgaggcctgtgcagactactcaagaggaggacggctgttcatgccggttcccagaggaggaggaaggcggctgcgaactgcgcgtgaaattcagccgcagcgcagatgctccagcctacaagcaggggcagaaccagctctacaacgaactcaatcttggtcggagagaggagtacgacgtgctggacaagcggagaggacgggacccagaaatgggcgggaagccgcgcagaaagaatccccaagagggcctgtacaacgagctccaaaaggataagatggcagaagcctatagcgagattggtatgaaaggggaacgcagaagaggcaaaggccacgacggactgtaccagggactcagcaccgccaccaaggacacctatgacgctcttcacatgcaggccctgccgcctcgg

SEQ ID NO: 2082 - DNA, 1458 bp, Artificial Sequence
  source: /note="Description of Artificial Sequence: Synthetic polynucleotide"
atggccctccctgtcaccgccctgctgcttccgctggctcttctgctccacgccgctcggcccgaggtgcagctggtgcagagcggagccgaggtcaagaagcctggagaatccctgaggatcagctgcaaaggcagcgggtataccttcacctcctactggatgaattgggtccgccagatgcccggaaaaggcctggagtggatgggacggattgacccctacgactcggaaacccattacaaccagaagttcaaggatcacgtgaccatctccgtggacaagtccatttccactgcgtacctccagtggtcaagcctgaaggcctccgacactgctatgtactactgcgcacgcggaaactgggatgattactggggacagggaacaaccgtgactgtgtcctccgggggtggcggtagcggaggagggggctccggcggcggcggctcagggggcggaggaagcgacgtgcagctcacccagtcgccctcatttctgtcggcctcagtgggagacagagtgaccattacttgtcgggcctccaagagcatctccaaggacctggcctggtatcagcagaagccaggaaaggcgcctaagttgctcatctactcggggtcgaccctgcaatctggcgtgccgtcccggttctccggttcgggaagcggtaccgaattcacccttactatctcctccctgcaaccggaggacttcgccacctactactgccaacagcacaacaagtacccgtacactttcgggggtggcacgaaggtcgaaatcaagaccactaccccagcaccgaggccacccaccccggctcctaccatcgcctcccagcctctgtccctgcgtccggaggcatgtagacccgcagctggtggggccgtgcatacccggggtcttgacttcgcctgcgatatctacatttgggcccctctggctggtacttgcggggtcctgctgctttcactcgtgatcactctttactgtaagcgcggtcggaagaagctgctgtacatctttaagcaacccttcatgaggcctgtgcagactactcaagaggaggacggctgttcatgccggttcccagaggaggaggaaggcggctgcgaactgcgcgtgaaattcagccgcagcgcagatgctccagcctacaagcaggggcagaaccagctctacaacgaactcaatcttggtcggagagaggagtacgacgtgctggacaagcggagaggacgggacccagaaatgggcgggaagccgcgcagaaagaatccccaagagggcctgtacaacgagctccaaaaggataagatggcagaagcctatagcgagattggtatgaaaggggaacgcagaagaggcaaaggccacgacggactgtaccagggactcagcaccgccaccaaggacacctatgacgctcttcacatgcaggccctgccgcctcgg

SEQ ID NO: 2083 - DNA, 1458 bp, Artificial Sequence
  source: /note="Description of Artificial Sequence: Synthetic polynucleotide"
atggccctccctgtcaccgccctgctgcttccgctggctcttctgctccacgccgctcggcccgaggtgcagctggtgcagagcggagccgaggtcaagaagcctggagaatccctgaggatcagctgcaaaggcagcgggtataccttcacctcctactggatgaattgggtccgccagatgcccggaaaaggcctggagtggatgggacggattgacccctacgactcggaaacccattacaaccagaagttcaaggatcacgtgaccatctccgtggacaagtccatttccactgcgtacctccagtggtcaagcctgaaggcctccgacactgctatgtactactgcgcacgcggaaactgggatgattactggggacagggaacaaccgtgactgtgtcctccgggggtggcggtagcggaggagggggctccggcggcggcggctcagggggcggaggaagcgaagtggtgctgacccagtcgcccgcaaccctctctctgtcgccgggagaacgcgccactctttcctgtcgggcgtccaagagcatctcaaaggacctcgcctggtaccagcagaagcctggtcaagccccgcggctgctgatctactccggctccacgctgcaatcaggaatcccagccagattttccggttcggggtcggggactgacttcaccttgaccattagctcgctggaacctgaggacttcgccgtgtattactgccagcagcacaacaagtacccgtacaccttcggaggcggtactaaggtcgagatcaagaccactaccccagcaccgaggccacccaccccggctcctaccatcgcctcccagcctctgtccctgcgtccggaggcatgtagacccgcagctggtggggccgtgcatacccggggtcttgacttcgcctgcgatatctacatttgggcccctctggctggtacttgcggggtcctgctgctttcactcgtgatcactctttactgtaagcgcggtcggaagaagctgctgtacatctttaagcaacccttcatgaggcctgtgcagactactcaagaggaggacggctgttcatgccggttcccagaggaggaggaaggcggctgcgaactgcgcgtgaaattcagccgcagcgcagatgctccagcctacaagcaggggcagaaccagctctacaacgaactcaatcttggtcggagagaggagtacgacgtgctggacaagcggagaggacgggacccagaaatgggcgggaagccgcgcagaaagaatccccaagagggcctgtacaacgagctccaaaaggataagatggcagaagcctatagcgagattggtatgaaaggggaacgcagaagaggcaaaggccacgacggactgtaccagggactcagcaccgccaccaaggacacctatgacgctcttcacatgcaggccctgccgcctcgg

SEQ ID NO: 2084 - DNA, 1458 bp, Artificial Sequence
  source: /note="Description of Artificial Sequence: Synthetic polynucleotide"
atggccctccctgtcaccgccctgctgcttccgctggctcttctgctccacgccgctcggcccgaggtgcagctggtgcagagcggagccgaggtcaagaagcctggagaatccctgaggatcagctgcaaaggcagcgggtataccttcacctcctactggatgaattgggtccgccagatgcccggaaaaggcctggagtggatgggacggattgacccctacgactcggaaacccattacaaccagaagttcaaggatcacgtgaccatctccgtggacaagtccatttccactgcgtacctccagtggtcaagcctgaaggcctccgacactgctatgtactactgcgcacgcggaaactgggatgattactggggacagggaacaaccgtgactgtgtcctccgggggtggcggtagcggaggagggggctccggcggcggcggctcagggggcggaggaagcgacgtcgtgatgacccagtcaccggcattcctgtccgtgactcccggagaaaaggtcacgattacttgccgggcgtccaagagcatctccaaggacctcgcctggtaccaacagaagccggaccaggcccctaagctgttgatctactcggggtccacccttcaatcgggagtgccatcgcggtttagcggttcgggttctgggaccgacttcactttcaccatctcctcactggaagccgaggatgccgccacttactactgtcagcagcacaacaagtatccgtacaccttcggaggcggtaccaaagtggagatcaagaccactaccccagcaccgaggccacccaccccggctcctaccatcgcctcccagcctctgtccctgcgtccggaggcatgtagacccgcagctggtggggccgtgcatacccggggtcttgacttcgcctgcgatatctacatttgggcccctctggctggtacttgcggggtcctgctgctttcactcgtgatcactctttactgtaagcgcggtcggaagaagctgctgtacatctttaagcaacccttcatgaggcctgtgcagactactcaagaggaggacggctgttcatgccggttcccagaggaggaggaaggcggctgcgaactgcgcgtgaaattcagccgcagcgcagatgctccagcctacaagcaggggcagaaccagctctacaacgaactcaatcttggtcggagagaggagtacgacgtgctggacaagcggagaggacgggacccagaaatgggcgggaagccgcgcagaaagaatccccaagagggcctgtacaacgagctccaaaaggataagatggcagaagcctatagcgagattggtatgaaaggggaacgcagaagaggcaaaggccacgacggactgtaccagggactcagcaccgccaccaaggacacctatgacgctcttcacatgcaggccctgccgcctcgg

SEQ ID NO: 2085 - DNA, 1458 bp, Artificial Sequence
  source: /note="Description of Artificial Sequence: Synthetic polynucleotide"
atggccctccctgtcaccgccctgctgcttccgctggctcttctgctccacgccgctcggcccgaggtgcagctggtgcagagcggagccgaggtcaagaagcctggagaatccctgaggatcagctgcaaaggcagcgggtataccttcacctcctactggatgaattgggtccgccagatgcccggaaaaggcctggagtggatgggacggattgacccctacgactcggaaacccattacaaccagaagttcaaggatcacgtgaccatctccgtggacaagtccatttccactgcgtacctccagtggtcaagcctgaaggcctccgacactgctatgtactactgcgcacgcggaaactgggatgattactggggacagggaacaaccgtgactgtgtcctccgggggtggcggtagcggaggagggggctccggcggcggcggctcagggggcggaggaagcgacgtggtcatgactcagtccccggactcactcgcggtgtcgcttggagagagagcgaccatcaactgtcgggcctcaaagagcatcagcaaggacctggcctggtaccagcagaagccgggacagccgccaaagctgctgatctactccgggtccaccttgcaatctggtgtccctgaccggttctccggttccgggtcgggtaccgacttcacgctcactatttcgtcgctgcaagccgaagatgtggccgtgtactattgccaacagcacaacaagtacccctacacttttggcggaggcaccaaggtggaaatcaagaccactaccccagcaccgaggccacccaccccggctcctaccatcgcctcccagcctctgtccctgcgtccggaggcatgtagacccgcagctggtggggccgtgcatacccggggtcttgacttcgcctgcgatatctacatttgggcccctctggctggtacttgcggggtcctgctgctttcactcgtgatcactctttactgtaagcgcggtcggaagaagctgctgtacatctttaagcaacccttcatgaggcctgtgcagactactcaagaggaggacggctgttcatgccggttcccagaggaggaggaaggcggctgcgaactgcgcgtgaaattcagccgcagcgcagatgctccagcctacaagcaggggcagaaccagctctacaacgaactcaatcttggtcggagagaggagtacgacgtgctggacaagcggagaggacgggacccagaaatgggcgggaagccgcgcagaaagaatccccaagagggcctgtacaacgagctccaaaaggataagatggcagaagcctatagcgagattggtatgaaaggggaacgcagaagaggcaaaggccacgacggactgtaccagggactcagcaccgccaccaaggacacctatgacgctcttcacatgcaggccctgccgcctcgg

SEQ ID NO: 2086 - DNA, 1458 bp, Artificial Sequence
  source: /note="Description of Artificial Sequence: Synthetic polynucleotide"
atggccctccctgtcaccgccctgctgcttccgctggctcttctgctccacgccgctcggcccgacgtgcagctcacccagtcgccctcatttctgtcggcctcagtgggagacagagtgaccattacttgtcgggcctccaagagcatctccaaggacctggcctggtatcagcagaagccaggaaaggcgcctaagttgctcatctactcggggtcgaccctgcaatctggcgtgccgtcccggttctccggttcgggaagcggtaccgaattcacccttactatctcctccctgcaaccggaggacttcgccacctactactgccaacagcacaacaagtacccgtacactttcgggggtggcacgaaggtcgaaatcaaggggggtggcggtagcggaggagggggctccggcggcggcggctcagggggcggaggaagcgaggtgcagctggtgcagagcggagccgaggtcaagaagcctggagaatccctgaggatcagctgcaaaggcagcgggtataccttcacctcctactggatgaattgggtccgccagatgcccggaaaaggcctggagtggatgggacggattgacccctacgactcggaaacccattacaaccagaagttcaaggatcacgtgaccatctccgtggacaagtccatttccactgcgtacctccagtggtcaagcctgaaggcctccgacactgctatgtactactgcgcacgcggaaactgggatgattactggggacagggaacaaccgtgactgtgtcctccaccactaccccagcaccgaggccacccaccccggctcctaccatcgcctcccagcctctgtccctgcgtccggaggcatgtagacccgcagctggtggggccgtgcatacccggggtcttgacttcgcctgcgatatctacatttgggcccctctggctggtacttgcggggtcctgctgctttcactcgtgatcactctttactgtaagcgcggtcggaagaagctgctgtacatctttaagcaacccttcatgaggcctgtgcagactactcaagaggaggacggctgttcatgccggttcccagaggaggaggaaggcggctgcgaactgcgcgtgaaattcagccgcagcgcagatgctccagcctacaagcaggggcagaaccagctctacaacgaactcaatcttggtcggagagaggagtacgacgtgctggacaagcggagaggacgggacccagaaatgggcgggaagccgcgcagaaagaatccccaagagggcctgtacaacgagctccaaaaggataagatggcagaagcctatagcgagattggtatgaaaggggaacgcagaagaggcaaaggccacgacggactgtaccagggactcagcaccgccaccaaggacacctatgacgctcttcacatgcaggccctgccgcctcgg

SEQ ID NO: 2087 - DNA, 1458 bp, Artificial Sequence
  source: /note="Description of Artificial Sequence: Synthetic polynucleotide"
atggccctccctgtcaccgccctgctgcttccgctggctcttctgctccacgccgctcggcccgaagtggtgctgacccagtcgcccgcaaccctctctctgtcgccgggagaacgcgccactctttcctgtcgggcgtccaagagcatctcaaaggacctcgcctggtaccagcagaagcctggtcaagccccgcggctgctgatctactccggctccacgctgcaatcaggaatcccagccagattttccggttcggggtcggggactgacttcaccttgaccattagctcgctggaacctgaggacttcgccgtgtattactgccagcagcacaacaagtacccgtacaccttcggaggcggtactaaggtcgagatcaaggggggtggcggtagcggaggagggggctccggcggcggcggctcagggggcggaggaagcgaggtgcagctggtgcagagcggagccgaggtcaagaagcctggagaatccctgaggatcagctgcaaaggcagcgggtataccttcacctcctactggatgaattgggtccgccagatgcccggaaaaggcctggagtggatgggacggattgacccctacgactcggaaacccattacaaccagaagttcaaggatcacgtgaccatctccgtggacaagtccatttccactgcgtacctccagtggtcaagcctgaaggcctccgacactgctatgtactactgcgcacgcggaaactgggatgattactggggacagggaacaaccgtgactgtgtcctccaccactaccccagcaccgaggccacccaccccggctcctaccatcgcctcccagcctctgtccctgcgtccggaggcatgtagacccgcagctggtggggccgtgcatacccggggtcttgacttcgcctgcgatatctacatttgggcccctctggctggtacttgcggggtcctgctgctttcactcgtgatcactctttactgtaagcgcggtcggaagaagctgctgtacatctttaagcaacccttcatgaggcctgtgcagactactcaagaggaggacggctgttcatgccggttcccagaggaggaggaaggcggctgcgaactgcgcgtgaaattcagccgcagcgcagatgctccagcctacaagcaggggcagaaccagctctacaacgaactcaatcttggtcggagagaggagtacgacgtgctggacaagcggagaggacgggacccagaaatgggcgggaagccgcgcagaaagaatccccaagagggcctgtacaacgagctccaaaaggataagatggcagaagcctatagcgagattggtatgaaaggggaacgcagaagaggcaaaggccacgacggactgtaccagggactcagcaccgccaccaaggacacctatgacgctcttcacatgcaggccctgccgcctcgg

SEQ ID NO: 2088 - DNA, 1458 bp, Artificial Sequence
  source: /note="Description of Artificial Sequence: Synthetic polynucleotide"
atggccctccctgtcaccgccctgctgcttccgctggctcttctgctccacgccgctcggcccgacgtcgtgatgacccagtcaccggcattcctgtccgtgactcccggagaaaaggtcacgattacttgccgggcgtccaagagcatctccaaggacctcgcctggtaccaacagaagccggaccaggcccctaagctgttgatctactcggggtccacccttcaatcgggagtgccatcgcggtttagcggttcgggttctgggaccgacttcactttcaccatctcctcactggaagccgaggatgccgccacttactactgtcagcagcacaacaagtatccgtacaccttcggaggcggtaccaaagtggagatcaaggggggtggcggtagcggaggagggggctccggcggcggcggctcagggggcggaggaagcgaggtgcagctggtgcagagcggagccgaggtcaagaagcctggagaatccctgaggatcagctgcaaaggcagcgggtataccttcacctcctactggatgaattgggtccgccagatgcccggaaaaggcctggagtggatgggacggattgacccctacgactcggaaacccattacaaccagaagttcaaggatcacgtgaccatctccgtggacaagtccatttccactgcgtacctccagtggtcaagcctgaaggcctccgacactgctatgtactactgcgcacgcggaaactgggatgattactggggacagggaacaaccgtgactgtgtcctccaccactaccccagcaccgaggccacccaccccggctcctaccatcgcctcccagcctctgtccctgcgtccggaggcatgtagacccgcagctggtggggccgtgcatacccggggtcttgacttcgcctgcgatatctacatttgggcccctctggctggtacttgcggggtcctgctgctttcactcgtgatcactctttactgtaagcgcggtcggaagaagctgctgtacatctttaagcaacccttcatgaggcctgtgcagactactcaagaggaggacggctgttcatgccggttcccagaggaggaggaaggcggctgcgaactgcgcgtgaaattcagccgcagcgcagatgctccagcctacaagcaggggcagaaccagctctacaacgaactcaatcttggtcggagagaggagtacgacgtgctggacaagcggagaggacgggacccagaaatgggcgggaagccgcgcagaaagaatccccaagagggcctgtacaacgagctccaaaaggataagatggcagaagcctatagcgagattggtatgaaaggggaacgcagaagaggcaaaggccacgacggactgtaccagggactcagcaccgccaccaaggacacctatgacgctcttcacatgcaggccctgccgcctcgg

SEQ ID NO: 2089 - DNA, 1458 bp, Artificial Sequence
  source: /note="Description of Artificial Sequence: Synthetic polynucleotide"
atggccctccctgtcaccgccctgctgcttccgctggctcttctgctccacgccgctcggcccgacgtggtcatgactcagtccccggactcactcgcggtgtcgcttggagagagagcgaccatcaactgtcgggcctcaaagagcatcagcaaggacctggcctggtaccagcagaagccgggacagccgccaaagctgctgatctactccgggtccaccttgcaatctggtgtccctgaccggttctccggttccgggtcgggtaccgacttcacgctcactatttcgtcgctgcaagccgaagatgtggccgtgtactattgccaacagcacaacaagtacccctacacttttggcggaggcaccaaggtggaaatcaaggggggtggcggtagcggaggagggggctccggcggcggcggctcagggggcggaggaagcgaggtgcagctggtgcagagcggagccgaggtcaagaagcctggagaatccctgaggatcagctgcaaaggcagcgggtataccttcacctcctactggatgaattgggtccgccagatgcccggaaaaggcctggagtggatgggacggattgacccctacgactcggaaacccattacaaccagaagttcaaggatcacgtgaccatctccgtggacaagtccatttccactgcgtacctccagtggtcaagcctgaaggcctccgacactgctatgtactactgcgcacgcggaaactgggatgattactggggacagggaacaaccgtgactgtgtcctccaccactaccccagcaccgaggccacccaccccggctcctaccatcgcctcccagcctctgtccctgcgtccggaggcatgtagacccgcagctggtggggccgtgcatacccggggtcttgacttcgcctgcgatatctacatttgggcccctctggctggtacttgcggggtcctgctgctttcactcgtgatcactctttactgtaagcgcggtcggaagaagctgctgtacatctttaagcaacccttcatgaggcctgtgcagactactcaagaggaggacggctgttcatgccggttcccagaggaggaggaaggcggctgcgaactgcgcgtgaaattcagccgcagcgcagatgctccagcctacaagcaggggcagaaccagctctacaacgaactcaatcttggtcggagagaggagtacgacgtgctggacaagcggagaggacgggacccagaaatgggcgggaagccgcgcagaaagaatccccaagagggcctgtacaacgagctccaaaaggataagatggcagaagcctatagcgagattggtatgaaaggggaacgcagaagaggcaaaggccacgacggactgtaccagggactcagcaccgccaccaaggacacctatgacgctcttcacatgcaggccctgccgcctcgg

SEQ ID NO: 2090 - DNA, 1458 bp, Artificial Sequence
  source: /note="Description of Artificial Sequence: Synthetic polynucleotide"
atggccctccctgtcaccgccctgctgcttccgctggctcttctgctccacgccgctcggcccgaagtgcagctcgtcgagagcggagggggactggtgcagcccggaggaagcctgaggctgtcctgcgctgcctccggctacaccttcacctcctactggatgaactgggtcagacaggcacctggaaagggactggtctgggtgtcgcgcattgacccctacgactccgaaacccattacaatcagaaattcaaggaccgcttcaccatctccgtggacaaagccaagagcaccgcgtacctccaaatgaactccctgcgcgctgaggatacagcagtgtactattgcgcccggggaaactgggatgattactggggccagggaactactgtgactgtgtcatccgggggtggcggtagcggaggagggggctccggcggcggcggctcagggggcggaggaagcgacgtgcagctcacccagtcgccctcatttctgtcggcctcagtgggagacagagtgaccattacttgtcgggcctccaagagcatctccaaggacctggcctggtatcagcagaagccaggaaaggcgcctaagttgctcatctactcggggtcgaccctgcaatctggcgtgccgtcccggttctccggttcgggaagcggtaccgaattcacccttactatctcctccctgcaaccggaggacttcgccacctactactgccaacagcacaacaagtacccgtacactttcgggggtggcacgaaggtcgaaatcaagaccactaccccagcaccgaggccacccaccccggctcctaccatcgcctcccagcctctgtccctgcgtccggaggcatgtagacccgcagctggtggggccgtgcatacccggggtcttgacttcgcctgcgatatctacatttgggcccctctggctggtacttgcggggtcctgctgctttcactcgtgatcactctttactgtaagcgcggtcggaagaagctgctgtacatctttaagcaacccttcatgaggcctgtgcagactactcaagaggaggacggctgttcatgccggttcccagaggaggaggaaggcggctgcgaactgcgcgtgaaattcagccgcagcgcagatgctccagcctacaagcaggggcagaaccagctctacaacgaactcaatcttggtcggagagaggagtacgacgtgctggacaagcggagaggacgggacccagaaatgggcgggaagccgcgcagaaagaatccccaagagggcctgtacaacgagctccaaaaggataagatggcagaagcctatagcgagattggtatgaaaggggaacgcagaagaggcaaaggccacgacggactgtaccagggactcagcaccgccaccaaggacacctatgacgctcttcacatgcaggccctgccgcctcgg

SEQ ID NO: 2091 - DNA, 1458 bp, Artificial Sequence
  source: /note="Description of Artificial Sequence: Synthetic polynucleotide"
atggccctccctgtcaccgccctgctgcttccgctggctcttctgctccacgccgctcggcccgaagtgcagctcgtcgagagcggagggggactggtgcagcccggaggaagcctgaggctgtcctgcgctgcctccggctacaccttcacctcctactggatgaactgggtcagacaggcacctggaaagggactggtctgggtgtcgcgcattgacccctacgactccgaaacccattacaatcagaaattcaaggaccgcttcaccatctccgtggacaaagccaagagcaccgcgtacctccaaatgaactccctgcgcgctgaggatacagcagtgtactattgcgcccggggaaactgggatgattactggggccagggaactactgtgactgtgtcatccgggggtggcggtagcggaggagggggctccggcggcggcggctcagggggcggaggaagcgaagtggtgctgacccagtcgcccgcaaccctctctctgtcgccgggagaacgcgccactctttcctgtcgggcgtccaagagcatctcaaaggacctcgcctggtaccagcagaagcctggtcaagccccgcggctgctgatctactccggctccacgctgcaatcaggaatcccagccagattttccggttcggggtcggggactgacttcaccttgaccattagctcgctggaacctgaggacttcgccgtgtattactgccagcagcacaacaagtacccgtacaccttcggaggcggtactaaggtcgagatcaagaccactaccccagcaccgaggccacccaccccggctcctaccatcgcctcccagcctctgtccctgcgtccggaggcatgtagacccgcagctggtggggccgtgcatacccggggtcttgacttcgcctgcgatatctacatttgggcccctctggctggtacttgcggggtcctgctgctttcactcgtgatcactctttactgtaagcgcggtcggaagaagctgctgtacatctttaagcaacccttcatgaggcctgtgcagactactcaagaggaggacggctgttcatgccggttcccagaggaggaggaaggcggctgcgaactgcgcgtgaaattcagccgcagcgcagatgctccagcctacaagcaggggcagaaccagctctacaacgaactcaatcttggtcggagagaggagtacgacgtgctggacaagcggagaggacgggacccagaaatgggcgggaagccgcgcagaaagaatccccaagagggcctgtacaacgagctccaaaaggataagatggcagaagcctatagcgagattggtatgaaaggggaacgcagaagaggcaaaggccacgacggactgtaccagggactcagcaccgccaccaaggacacctatgacgctcttcacatgcaggccctgccgcctcgg

SEQ ID NO: 2092 - DNA, 1458 bp, Artificial Sequence
  source: /note="Description of Artificial Sequence: Synthetic polynucleotide"
atggccctccctgtcaccgccctgctgcttccgctggctcttctgctccacgccgctcggcccgaagtgcagctcgtcgagagcggagggggactggtgcagcccggaggaagcctgaggctgtcctgcgctgcctccggctacaccttcacctcctactggatgaactgggtcagacaggcacctggaaagggactggtctgggtgtcgcgcattgacccctacgactccgaaacccattacaatcagaaattcaaggaccgcttcaccatctccgtggacaaagccaagagcaccgcgtacctccaaatgaactccctgcgcgctgaggatacagcagtgtactattgcgcccggggaaactgggatgattactggggccagggaactactgtgactgtgtcatccgggggtggcggtagcggaggagggggctccggcggcggcggctcagggggcggaggaagcgacgtcgtgatgacccagtcaccggcattcctgtccgtgactcccggagaaaaggtcacgattacttgccgggcgtccaagagcatctccaaggacctcgcctggtaccaacagaagccggaccaggcccctaagctgttgatctactcggggtccacccttcaatcgggagtgccatcgcggtttagcggttcgggttctgggaccgacttcactttcaccatctcctcactggaagccgaggatgccgccacttactactgtcagcagcacaacaagtatccgtacaccttcggaggcggtaccaaagtggagatcaagaccactaccccagcaccgaggccacccaccccggctcctaccatcgcctcccagcctctgtccctgcgtccggaggcatgtagacccgcagctggtggggccgtgcatacccggggtcttgacttcgcctgcgatatctacatttgggcccctctggctggtacttgcggggtcctgctgctttcactcgtgatcactctttactgtaagcgcggtcggaagaagctgctgtacatctttaagcaacccttcatgaggcctgtgcagactactcaagaggaggacggctgttcatgccggttcccagaggaggaggaaggcggctgcgaactgcgcgtgaaattcagccgcagcgcagatgctccagcctacaagcaggggcagaaccagctctacaacgaactcaatcttggtcggagagaggagtacgacgtgctggacaagcggagaggacgggacccagaaatgggcgggaagccgcgcagaaagaatccccaagagggcctgtacaacgagctccaaaaggataagatggcagaagcctatagcgagattggtatgaaaggggaacgcagaagaggcaaaggccacgacggactgtaccagggactcagcaccgccaccaaggacacctatgacgctcttcacatgcaggccctgccgcctcgg

SEQ ID NO: 2093 - DNA, 1458 bp, Artificial Sequence
  source: /note="Description of Artificial Sequence: Synthetic polynucleotide"
atggccctccctgtcaccgccctgctgcttccgctggctcttctgctccacgccgctcggcccgaagtgcagctcgtcgagagcggagggggactggtgcagcccggaggaagcctgaggctgtcctgcgctgcctccggctacaccttcacctcctactggatgaactgggtcagacaggcacctggaaagggactggtctgggtgtcgcgcattgacccctacgactccgaaacccattacaatcagaaattcaaggaccgcttcaccatctccgtggacaaagccaagagcaccgcgtacctccaaatgaactccctgcgcgctgaggatacagcagtgtactattgcgcccggggaaactgggatgattactggggccagggaactactgtgactgtgtcatccgggggtggcggtagcggaggagggggctccggcggcggcggctcagggggcggaggaagcgacgtggtcatgactcagtccccggactcactcgcggtgtcgcttggagagagagcgaccatcaactgtcgggcctcaaagagcatcagcaaggacctggcctggtaccagcagaagccgggacagccgccaaagctgctgatctactccgggtccaccttgcaatctggtgtccctgaccggttctccggttccgggtcgggtaccgacttcacgctcactatttcgtcgctgcaagccgaagatgtggccgtgtactattgccaacagcacaacaagtacccctacacttttggcggaggcaccaaggtggaaatcaagaccactaccccagcaccgaggccacccaccccggctcctaccatcgcctcccagcctctgtccctgcgtccggaggcatgtagacccgcagctggtggggccgtgcatacccggggtcttgacttcgcctgcgatatctacatttgggcccctctggctggtacttgcggggtcctgctgctttcactcgtgatcactctttactgtaagcgcggtcggaagaagctgctgtacatctttaagcaacccttcatgaggcctgtgcagactactcaagaggaggacggctgttcatgccggttcccagaggaggaggaaggcggctgcgaactgcgcgtgaaattcagccgcagcgcagatgctccagcctacaagcaggggcagaaccagctctacaacgaactcaatcttggtcggagagaggagtacgacgtgctggacaagcggagaggacgggacccagaaatgggcgggaagccgcgcagaaagaatccccaagagggcctgtacaacgagctccaaaaggataagatggcagaagcctatagcgagattggtatgaaaggggaacgcagaagaggcaaaggccacgacggactgtaccagggactcagcaccgccaccaaggacacctatgacgctcttcacatgcaggccctgccgcctcgg

SEQ ID NO: 2094 - DNA, 1458 bp, Artificial Sequence
  source: /note="Description of Artificial Sequence: Synthetic polynucleotide"
atggccctccctgtcaccgccctgctgcttccgctggctcttctgctccacgccgctcggcccgacgtgcagctcacccagtcgccctcatttctgtcggcctcagtgggagacagagtgaccattacttgtcgggcctccaagagcatctccaaggacctggcctggtatcagcagaagccaggaaaggcgcctaagttgctcatctactcggggtcgaccctgcaatctggcgtgccgtcccggttctccggttcgggaagcggtaccgaattcacccttactatctcctccctgcaaccggaggacttcgccacctactactgccaacagcacaacaagtacccgtacactttcgggggtggcacgaaggtcgaaatcaaggggggtggcggtagcggaggagggggctccggcggcggcggctcagggggcggaggaagcgaagtgcagctcgtcgagagcggagggggactggtgcagcccggaggaagcctgaggctgtcctgcgctgcctccggctacaccttcacctcctactggatgaactgggtcagacaggcacctggaaagggactggtctgggtgtcgcgcattgacccctacgactccgaaacccattacaatcagaaattcaaggaccgcttcaccatctccgtggacaaagccaagagcaccgcgtacctccaaatgaactccctgcgcgctgaggatacagcagtgtactattgcgcccggggaaactgggatgattactggggccagggaactactgtgactgtgtcatccaccactaccccagcaccgaggccacccaccccggctcctaccatcgcctcccagcctctgtccctgcgtccggaggcatgtagacccgcagctggtggggccgtgcatacccggggtcttgacttcgcctgcgatatctacatttgggcccctctggctggtacttgcggggtcctgctgctttcactcgtgatcactctttactgtaagcgcggtcggaagaagctgctgtacatctttaagcaacccttcatgaggcctgtgcagactactcaagaggaggacggctgttcatgccggttcccagaggaggaggaaggcggctgcgaactgcgcgtgaaattcagccgcagcgcagatgctccagcctacaagcaggggcagaaccagctctacaacgaactcaatcttggtcggagagaggagtacgacgtgctggacaagcggagaggacgggacccagaaatgggcgggaagccgcgcagaaagaatccccaagagggcctgtacaacgagctccaaaaggataagatggcagaagcctatagcgagattggtatgaaaggggaacgcagaagaggcaaaggccacgacggactgtaccagggactcagcaccgccaccaaggacacctatgacgctcttcacatgcaggccctgccgcctcgg

SEQ ID NO: 2095 - DNA, 1458 bp, Artificial Sequence
  source: /note="Description of Artificial Sequence: Synthetic polynucleotide"
atggccctccctgtcaccgccctgctgcttccgctggctcttctgctccacgccgctcggcccgaagtggtgctgacccagtcgcccgcaaccctctctctgtcgccgggagaacgcgccactctttcctgtcgggcgtccaagagcatctcaaaggacctcgcctggtaccagcagaagcctggtcaagccccgcggctgctgatctactccggctccacgctgcaatcaggaatcccagccagattttccggttcggggtcggggactgacttcaccttgaccattagctcgctggaacctgaggacttcgccgtgtattactgccagcagcacaacaagtacccgtacaccttcggaggcggtactaaggtcgagatcaaggggggtggcggtagcggaggagggggctccggcggcggcggctcagggggcggaggaagcgaagtgcagctcgtcgagagcggagggggactggtgcagcccggaggaagcctgaggctgtcctgcgctgcctccggctacaccttcacctcctactggatgaactgggtcagacaggcacctggaaagggactggtctgggtgtcgcgcattgacccctacgactccgaaacccattacaatcagaaattcaaggaccgcttcaccatctccgtggacaaagccaagagcaccgcgtacctccaaatgaactccctgcgcgctgaggatacagcagtgtactattgcgcccggggaaactgggatgattactggggccagggaactactgtgactgtgtcatccaccactaccccagcaccgaggccacccaccccggctcctaccatcgcctcccagcctctgtccctgcgtccggaggcatgtagacccgcagctggtggggccgtgcatacccggggtcttgacttcgcctgcgatatctacatttgggcccctctggctggtacttgcggggtcctgctgctttcactcgtgatcactctttactgtaagcgcggtcggaagaagctgctgtacatctttaagcaacccttcatgaggcctgtgcagactactcaagaggaggacggctgttcatgccggttcccagaggaggaggaaggcggctgcgaactgcgcgtgaaattcagccgcagcgcagatgctccagcctacaagcaggggcagaaccagctctacaacgaactcaatcttggtcggagagaggagtacgacgtgctggacaagcggagaggacgggacccagaaatgggcgggaagccgcgcagaaagaatccccaagagggcctgtacaacgagctccaaaaggataagatggcagaagcctatagcgagattggtatgaaaggggaacgcagaagaggcaaaggccacgacggactgtaccagggactcagcaccgccaccaaggacacctatgacgctcttcacatgcaggccctgccgcctcgg

SEQ ID NO: 2096 - DNA, 1458 bp, Artificial Sequence
  source: /note="Description of Artificial Sequence: Synthetic polynucleotide"
atggccctccctgtcaccgccctgctgcttccgctggctcttctgctccacgccgctcggcccgacgtcgtgatgacccagtcaccggcattcctgtccgtgactcccggagaaaaggtcacgattacttgccgggcgtccaagagcatctccaaggacctcgcctggtaccaacagaagccggaccaggcccctaagctgttgatctactcggggtccacccttcaatcgggagtgccatcgcggtttagcggttcgggttctgggaccgacttcactttcaccatctcctcactggaagccgaggatgccgccacttactactgtcagcagcacaacaagtatccgtacaccttcggaggcggtaccaaagtggagatcaaggggggtggcggtagcggaggagggggctccggcggcggcggctcagggggcggaggaagcgaagtgcagctcgtcgagagcggagggggactggtgcagcccggaggaagcctgaggctgtcctgcgctgcctccggctacaccttcacctcctactggatgaactgggtcagacaggcacctggaaagggactggtctgggtgtcgcgcattgacccctacgactccgaaacccattacaatcagaaattcaaggaccgcttcaccatctccgtggacaaagccaagagcaccgcgtacctccaaatgaactccctgcgcgctgaggatacagcagtgtactattgcgcccggggaaactgggatgattactggggccagggaactactgtgactgtgtcatccaccactaccccagcaccgaggccacccaccccggctcctaccatcgcctcccagcctctgtccctgcgtccggaggcatgtagacccgcagctggtggggccgtgcatacccggggtcttgacttcgcctgcgatatctacatttgggcccctctggctggtacttgcggggtcctgctgctttcactcgtgatcactctttactgtaagcgcggtcggaagaagctgctgtacatctttaagcaacccttcatgaggcctgtgcagactactcaagaggaggacggctgttcatgccggttcccagaggaggaggaaggcggctgcgaactgcgcgtgaaattcagccgcagcgcagatgctccagcctacaagcaggggcagaaccagctctacaacgaactcaatcttggtcggagagaggagtacgacgtgctggacaagcggagaggacgggacccagaaatgggcgggaagccgcgcagaaagaatccccaagagggcctgtacaacgagctccaaaaggataagatggcagaagcctatagcgagattggtatgaaaggggaacgcagaagaggcaaaggccacgacggactgtaccagggactcagcaccgccaccaaggacacctatgacgctcttcacatgcaggccctgccgcctcgg

SEQ ID NO: 2097 - DNA, 1458 bp, Artificial Sequence
  source: /note="Description of Artificial Sequence: Synthetic polynucleotide"
atggccctccctgtcaccgccctgctgcttccgctggctcttctgctccacgccgctcggcccgacgtggtcatgactcagtccccggactcactcgcggtgtcgcttggagagagagcgaccatcaactgtcgggcctcaaagagcatcagcaaggacctggcctggtaccagcagaagccgggacagccgccaaagctgctgatctactccgggtccaccttgcaatctggtgtccctgaccggttctccggttccgggtcgggtaccgacttcacgctcactatttcgtcgctgcaagccgaagatgtggccgtgtactattgccaacagcacaacaagtacccctacacttttggcggaggcaccaaggtggaaatcaaggggggtggcggtagcggaggagggggctccggcggcggcggctcagggggcggaggaagcgaagtgcagctcgtcgagagcggagggggactggtgcagcccggaggaagcctgaggctgtcctgcgctgcctccggctacaccttcacctcctactggatgaactgggtcagacaggcacctggaaagggactggtctgggtgtcgcgcattgacccctacgactccgaaacccattacaatcagaaattcaaggaccgcttcaccatctccgtggacaaagccaagagcaccgcgtacctccaaatgaactccctgcgcgctgaggatacagcagtgtactattgcgcccggggaaactgggatgattactggggccagggaactactgtgactgtgtcatccaccactaccccagcaccgaggccacccaccccggctcctaccatcgcctcccagcctctgtccctgcgtccggaggcatgtagacccgcagctggtggggccgtgcatacccggggtcttgacttcgcctgcgatatctacatttgggcccctctggctggtacttgcggggtcctgctgctttcactcgtgatcactctttactgtaagcgcggtcggaagaagctgctgtacatctttaagcaacccttcatgaggcctgtgcagactactcaagaggaggacggctgttcatgccggttcccagaggaggaggaaggcggctgcgaactgcgcgtgaaattcagccgcagcgcagatgctccagcctacaagcaggggcagaaccagctctacaacgaactcaatcttggtcggagagaggagtacgacgtgctggacaagcggagaggacgggacccagaaatgggcgggaagccgcgcagaaagaatccccaagagggcctgtacaacgagctccaaaaggataagatggcagaagcctatagcgagattggtatgaaaggggaacgcagaagaggcaaaggccacgacggactgtaccagggactcagcaccgccaccaaggacacctatgacgctcttcacatgcaggccctgccgcctcgg

SEQ ID NO: 2098 - protein, 487 aa, Artificial Sequence
  source: /note="Description of Artificial Sequence: Synthetic polypeptide"
MALPVTALLLPLALLLHAARPQVQLVQSGAEVKKPGASVKVSCKASGYTFTGYYMHWVRQAPGQGLEWMGWINPNSGGTNYAQKFQGRVTMTRDTSISTAYMELSRLRSDDTAVYYCARDMNILATVPFDIWGQGTMVTVSSGGGGSGGGGSGGGGSDIQMTQSPSSLSASVGDRVTITCRASQSISTYLNWYQQKPGKAPNLLIYAAFSLQSGVPSRFSGSGSGTDFTLTINSLQPEDFATYYCQQGDSVPLTFGGGTKLEIKTTTPAPRPPTPAPTIASQPLSLRPEACRPAAGGAVHTRGLDFACDIYIWAPLAGTCGVLLLSLVITLYCKRGRKKLLYIFKQPFMRPVQTTQEEDGCSCRFPEEEEGGCELRVKFSRSADAPAYKQGQNQLYNELNLGRREEYDVLDKRRGRDPEMGGKPRRKNPQEGLYNELQKDKMAEAYSEIGMKGERRRGKGHDGLYQGLSTATKDTYDALHMQALPPR

SEQ ID NO: 2099 - protein, 487 aa, Artificial Sequence
  source: /note="Description of Artificial Sequence: Synthetic polypeptide"
MALPVTALLLPLALLLHAARPQVQLVQSGAEVKKPGASVKVSCKASGYTFTGYYMHWVRQAPGQGLEWMGWINPNSGGTNYAQKFQGRVTLTRDTSISTVYMELSRLRSDDTAVYYCARDMNILATVPFDIWGQGTMVTVSSGGGGSGGGGSGGGGSDIQMTQSPSSLSASVGDRVTITCRASQSISSYLNWYQQKPGKAPKLLIYAASSLQSGVPSRFSGSGSGTDFTLTVNSLQPEDFATYYCQQGDSVPLTFGGGTRLEIKTTTPAPRPPTPAPTIASQPLSLRPEACRPAAGGAVHTRGLDFACDIYIWAPLAGTCGVLLLSLVITLYCKRGRKKLLYIFKQPFMRPVQTTQEEDGCSCRFPEEEEGGCELRVKFSRSADAPAYKQGQNQLYNELNLGRREEYDVLDKRRGRDPEMGGKPRRKNPQEGLYNELQKDKMAEAYSEIGMKGERRRGKGHDGLYQGLSTATKDTYDALHMQALPPR

SEQ ID NO: 2100 - protein, 487 aa, Artificial Sequence
  source: /note="Description of Artificial Sequence: Synthetic polypeptide"
MALPVTALLLPLALLLHAARPQVQLVQSGAEVKKPGASVKVSCKASGYIFTGYYIHWVRQAPGQGLEWMGWINPNSGGTNYAQKFQGRVTMTRDTSISTAYMELSGLRSDDPAVYYCARDMNILATVPFDIWGQGTLVTVSSGGGGSGGGGSGGGGSDIQLTQSPSSLSASVGDRVTITCRASQSISSYLNWYQQKPGKAPKLLIYAASSLQSGVPSRFSGSGSGTDFTLTVNSLQPEDFATYYCQQGDSVPLTFGGGTKVEIKTTTPAPRPPTPAPTIASQPLSLRPEACRPAAGGAVHTRGLDFACDIYIWAPLAGTCGVLLLSLVITLYCKRGRKKLLYIFKQPFMRPVQTTQEEDGCSCRFPEEEEGGCELRVKFSRSADAPAYKQGQNQLYNELNLGRREEYDVLDKRRGRDPEMGGKPRRKNPQEGLYNELQKDKMAEAYSEIGMKGERRRGKGHDGLYQGLSTATKDTYDALHMQALPPR

SEQ ID NO: 2101 - protein, 336 aa, Artificial Sequence
  source: /note="Description of Artificial Sequence: Synthetic polypeptide"
MALPVTALLLPLALLLHAARPQVQLQQSGAEVKKSGASVKVSCKASGYTFTDYYMHWLRQAPGQGLEWMGWINPNSGDTNYAQKFQGRVTLTRDTSISTVYMELSRLRSDDTAVYYCARDMNILATVPFDIWGQGTMVTVSSASGGGGSGGRASGGGGSDIQMTQSPSSLSASVGDRVTITCRASQSISSYLNWYQQKPGKAPKLLIYAASSLQSGVPSRFSGSGSGTDFTLTISSLQPEDFATYYCQQGDSVPLTFGGGTKVEIKTTTPAPRPPTPAPTIASQPLSLRPEACRPAAGGAVHTRGLDFACDIYIWAPLAGTCGVLLLSLVITLYCK

SEQ ID NO: 2102-2124 - skipped (23 entries)

SEQ ID NO: 2125 - protein, 486 aa, Artificial Sequence
  source: /note="Description of Artificial Sequence: Synthetic polypeptide"
MALPVTALLLPLALLLHAARPQVQLVQSGAEVKKPGASVKVSCKASGYTFTSYWMNWVRQAPGQGLEWMGRIDPYDSETHYNQKFKDRVTMTVDKSTSTAYMELSSLRSEDTAVYYCARGNWDDYWGQGTTVTVSSGGGGSGGGGSGGGGSGGGGSDVQLTQSPSFLSASVGDRVTITCRASKSISKDLAWYQQKPGKAPKLLIYSGSTLQSGVPSRFSGSGSGTEFTLTISSLQPEDFATYYCQQHNKYPYTFGGGTKVEIKTTTPAPRPPTPAPTIASQPLSLRPEACRPAAGGAVHTRGLDFACDIYIWAPLAGTCGVLLLSLVITLYCKRGRKKLLYIFKQPFMRPVQTTQEEDGCSCRFPEEEEGGCELRVKFSRSADAPAYKQGQNQLYNELNLGRREEYDVLDKRRGRDPEMGGKPRRKNPQEGLYNELQKDKMAEAYSEIGMKGERRRGKGHDGLYQGLSTATKDTYDALHMQALPPR

SEQ ID NO: 2126 - protein, 486 aa, Artificial Sequence
  source: /note="Description of Artificial Sequence: Synthetic polypeptide"
MALPVTALLLPLALLLHAARPQVQLVQSGAEVKKPGASVKVSCKASGYTFTSYWMNWVRQAPGQGLEWMGRIDPYDSETHYNQKFKDRVTMTVDKSTSTAYMELSSLRSEDTAVYYCARGNWDDYWGQGTTVTVSSGGGGSGGGGSGGGGSGGGGSEVVLTQSPATLSLSPGERATLSCRASKSISKDLAWYQQKPGQAPRLLIYSGSTLQSGIPARFSGSGSGTDFTLTISSLEPEDFAVYYCQQHNKYPYTFGGGTKVEIKTTTPAPRPPTPAPTIASQPLSLRPEACRPAAGGAVHTRGLDFACDIYIWAPLAGTCGVLLLSLVITLYCKRGRKKLLYIFKQPFMRPVQTTQEEDGCSCRFPEEEEGGCELRVKFSRSADAPAYKQGQNQLYNELNLGRREEYDVLDKRRGRDPEMGGKPRRKNPQEGLYNELQKDKMAEAYSEIGMKGERRRGKGHDGLYQGLSTATKDTYDALHMQALPPR

SEQ ID NO: 2127 - protein, 486 aa, Artificial Sequence
  source: /note="Description of Artificial Sequence: Synthetic polypeptide"
MALPVTALLLPLALLLHAARPQVQLVQSGAEVKKPGASVKVSCKASGYTFTSYWMNWVRQAPGQGLEWMGRIDPYDSETHYNQKFKDRVTMTVDKSTSTAYMELSSLRSEDTAVYYCARGNWDDYWGQGTTVTVSSGGGGSGGGGSGGGGSGGGGSDVVMTQSPAFLSVTPGEKVTITCRASKSISKDLAWYQQKPDQAPKLLIYSGSTLQSGVPSRFSGSGSGTDFTFTISSLEAEDAATYYCQQHNKYPYTFGGGTKVEIKTTTPAPRPPTPAPTIASQPLSLRPEACRPAAGGAVHTRGLDFACDIYIWAPLAGTCGVLLLSLVITLYCKRGRKKLLYIFKQPFMRPVQTTQEEDGCSCRFPEEEEGGCELRVKFSRSADAPAYKQGQNQLYNELNLGRREEYDVLDKRRGRDPEMGGKPRRKNPQEGLYNELQKDKMAEAYSEIGMKGERRRGKGHDGLYQGLSTATKDTYDALHMQALPPR

SEQ ID NO: 2128 - protein, 486 aa, Artificial Sequence
  source: /note="Description of Artificial Sequence: Synthetic polypeptide"
MALPVTALLLPLALLLHAARPQVQLVQSGAEVKKPGASVKVSCKASGYTFTSYWMNWVRQAPGQGLEWMGRIDPYDSETHYNQKFKDRVTMTVDKSTSTAYMELSSLRSEDTAVYYCARGNWDDYWGQGTTVTVSSGGGGSGGGGSGGGGSGGGGSDVVMTQSPDSLAVSLGERATINCRASKSISKDLAWYQQKPGQPPKLLIYSGSTLQSGVPDRFSGSGSGTDFTLTISSLQAEDVAVYYCQQHNKYPYTFGGGTKVEIKTTTPAPRPPTPAPTIASQPLSLRPEACRPAAGGAVHTRGLDFACDIYIWAPLAGTCGVLLLSLVITLYCKRGRKKLLYIFKQPFMRPVQTTQEEDGCSCRFPEEEEGGCELRVKFSRSADAPAYKQGQNQLYNELNLGRREEYDVLDKRRGRDPEMGGKPRRKNPQEGLYNELQKDKMAEAYSEIGMKGERRRGKGHDGLYQGLSTATKDTYDALHMQALPPR

SEQ ID NO: 2129 - protein, 486 aa, Artificial Sequence
  source: /note="Description of Artificial Sequence: Synthetic polypeptide"
MALPVTALLLPLALLLHAARPDVQLTQSPSFLSASVGDRVTITCRASKSISKDLAWYQQKPGKAPKLLIYSGSTLQSGVPSRFSGSGSGTEFTLTISSLQPEDFATYYCQQHNKYPYTFGGGTKVEIKGGGGSGGGGSGGGGSGGGGSQVQLVQSGAEVKKPGASVKVSCKASGYTFTSYWMNWVRQAPGQGLEWMGRIDPYDSETHYNQKFKDRVTMTVDKSTSTAYMELSSLRSEDTAVYYCARGNWDDYWGQGTTVTVSSTTTPAPRPPTPAPTIASQPLSLRPEACRPAAGGAVHTRGLDFACDIYIWAPLAGTCGVLLLSLVITLYCKRGRKKLLYIFKQPFMRPVQTTQEEDGCSCRFPEEEEGGCELRVKFSRSADAPAYKQGQNQLYNELNLGRREEYDVLDKRRGRDPEMGGKPRRKNPQEGLYNELQKDKMAEAYSEIGMKGERRRGKGHDGLYQGLSTATKDTYDALHMQALPPR

SEQ ID NO: 2130 - protein, 486 aa, Artificial Sequence
  source: /note="Description of Artificial Sequence: Synthetic polypeptide"
MALPVTALLLPLALLLHAARPEVVLTQSPATLSLSPGERATLSCRASKSISKDLAWYQQKPGQAPRLLIYSGSTLQSGIPARFSGSGSGTDFTLTISSLEPEDFAVYYCQQHNKYPYTFGGGTKVEIKGGGGSGGGGSGGGGSGGGGSQVQLVQSGAEVKKPGASVKVSCKASGYTFTSYWMNWVRQAPGQGLEWMGRIDPYDSETHYNQKFKDRVTMTVDKSTSTAYMELSSLRSEDTAVYYCARGNWDDYWGQGTTVTVSSTTTPAPRPPTPAPTIASQPLSLRPEACRPAAGGAVHTRGLDFACDIYIWAPLAGTCGVLLLSLVITLYCKRGRKKLLYIFKQPFMRPVQTTQEEDGCSCRFPEEEEGGCELRVKFSRSADAPAYKQGQNQLYNELNLGRREEYDVLDKRRGRDPEMGGKPRRKNPQEGLYNELQKDKMAEAYSEIGMKGERRRGKGHDGLYQGLSTATKDTYDALHMQALPPR

SEQ ID NO: 2131 - protein, 486 aa, Artificial Sequence
  source: /note="Description of Artificial Sequence: Synthetic polypeptide"
MALPVTALLLPLALLLHAARPDVVMTQSPAFLSVTPGEKVTITCRASKSISKDLAWYQQKPDQAPKLLIYSGSTLQSGVPSRFSGSGSGTDFTFTISSLEAEDAATYYCQQHNKYPYTFGGGTKVEIKGGGGSGGGGSGGGGSGGGGSQVQLVQSGAEVKKPGASVKVSCKASGYTFTSYWMNWVRQAPGQGLEWMGRIDPYDSETHYNQKFKDRVTMTVDKSTSTAYMELSSLRSEDTAVYYCARGNWDDYWGQGTTVTVSSTTTPAPRPPTPAPTIASQPLSLRPEACRPAAGGAVHTRGLDFACDIYIWAPLAGTCGVLLLSLVITLYCKRGRKKLLYIFKQPFMRPVQTTQEEDGCSCRFPEEEEGGCELRVKFSRSADAPAYKQGQNQLYNELNLGRREEYDVLDKRRGRDPEMGGKPRRKNPQEGLYNELQKDKMAEAYSEIGMKGERRRGKGHDGLYQGLSTATKDTYDALHMQALPPR

SEQ ID NO: 2132 - protein, 486 aa, Artificial Sequence
  source: /note="Description of Artificial Sequence: Synthetic polypeptide"
MALPVTALLLPLALLLHAARPDVVMTQSPDSLAVSLGERATINCRASKSISKDLAWYQQKPGQPPKLLIYSGSTLQSGVPDRFSGSGSGTDFTLTISSLQAEDVAVYYCQQHNKYPYTFGGGTKVEIKGGGGSGGGGSGGGGSGGGGSQVQLVQSGAEVKKPGASVKVSCKASGYTFTSYWMNWVRQAPGQGLEWMGRIDPYDSETHYNQKFKDRVTMTVDKSTSTAYMELSSLRSEDTAVYYCARGNWDDYWGQGTTVTVSSTTTPAPRPPTPAPTIASQPLSLRPEACRPAAGGAVHTRGLDFACDIYIWAPLAGTCGVLLLSLVITLYCKRGRKKLLYIFKQPFMRPVQTTQEEDGCSCRFPEEEEGGCELRVKFSRSADAPAYKQGQNQLYNELNLGRREEYDVLDKRRGRDPEMGGKPRRKNPQEGLYNELQKDKMAEAYSEIGMKGERRRGKGHDGLYQGLSTATKDTYDALHMQALPPR

SEQ ID NO: 2133 - protein, 486 aa, Artificial Sequence
  source: /note="Description of Artificial Sequence: Synthetic polypeptide"
MALPVTALLLPLALLLHAARPQVQLVQSGSELKKPGASVKVSCKASGYTFTSYWMNWVRQAPGQGLEWMGRIDPYDSETHYNQKFKDRFVFSVDKSVSTAYLQISSLKAEDTAVYYCARGNWDDYWGQGTTVTVSSGGGGSGGGGSGGGGSGGGGSDVQLTQSPSFLSASVGDRVTITCRASKSISKDLAWYQQKPGKAPKLLIYSGSTLQSGVPSRFSGSGSGTEFTLTISSLQPEDFATYYCQQHNKYPYTFGGGTKVEIKTTTPAPRPPTPAPTIASQPLSLRPEACRPAAGGAVHTRGLDFACDIYIWAPLAGTCGVLLLSLVITLYCKRGRKKLLYIFKQPFMRPVQTTQEEDGCSCRFPEEEEGGCELRVKFSRSADAPAYKQGQNQLYNELNLGRREEYDVLDKRRGRDPEMGGKPRRKNPQEGLYNELQKDKMAEAYSEIGMKGERRRGKGHDGLYQGLSTATKDTYDALHMQALPPR

SEQ ID NO: 2134 - protein, 486 aa, Artificial Sequence
  source: /note="Description of Artificial Sequence: Synthetic polypeptide"
MALPVTALLLPLALLLHAARPQVQLVQSGSELKKPGASVKVSCKASGYTFTSYWMNWVRQAPGQGLEWMGRIDPYDSETHYNQKFKDRFVFSVDKSVSTAYLQISSLKAEDTAVYYCARGNWDDYWGQGTTVTVSSGGGGSGGGGSGGGGSGGGGSEVVLTQSPATLSLSPGERATLSCRASKSISKDLAWYQQKPGQAPRLLIYSGSTLQSGIPARFSGSGSGTDFTLTISSLEPEDFAVYYCQQHNKYPYTFGGGTKVEIKTTTPAPRPPTPAPTIASQPLSLRPEACRPAAGGAVHTRGLDFACDIYIWAPLAGTCGVLLLSLVITLYCKRGRKKLLYIFKQPFMRPVQTTQEEDGCSCRFPEEEEGGCELRVKFSRSADAPAYKQGQNQLYNELNLGRREEYDVLDKRRGRDPEMGGKPRRKNPQEGLYNELQKDKMAEAYSEIGMKGERRRGKGHDGLYQGLSTATKDTYDALHMQALPPR

SEQ ID NO: 2135 - protein, 486 aa, Artificial Sequence
  source: /note="Description of Artificial Sequence: Synthetic polypeptide"
MALPVTALLLPLALLLHAARPQVQLVQSGSELKKPGASVKVSCKASGYTFTSYWMNWVRQAPGQGLEWMGRIDPYDSETHYNQKFKDRFVFSVDKSVSTAYLQISSLKAEDTAVYYCARGNWDDYWGQGTTVTVSSGGGGSGGGGSGGGGSGGGGSDVVMTQSPAFLSVTPGEKVTITCRASKSISKDLAWYQQKPDQAPKLLIYSGSTLQSGVPSRFSGSGSGTDFTFTISSLEAEDAATYYCQQHNKYPYTFGGGTKVEIKTTTPAPRPPTPAPTIASQPLSLRPEACRPAAGGAVHTRGLDFACDIYIWAPLAGTCGVLLLSLVITLYCKRGRKKLLYIFKQPFMRPVQTTQEEDGCSCRFPEEEEGGCELRVKFSRSADAPAYKQGQNQLYNELNLGRREEYDVLDKRRGRDPEMGGKPRRKNPQEGLYNELQKDKMAEAYSEIGMKGERRRGKGHDGLYQGLSTATKDTYDALHMQALPPR

SEQ ID NO: 2136 - protein, 486 aa, Artificial Sequence
  source: /note="Description of Artificial Sequence: Synthetic polypeptide"
MALPVTALLLPLALLLHAARPQVQLVQSGSELKKPGASVKVSCKASGYTFTSYWMNWVRQAPGQGLEWMGRIDPYDSETHYNQKFKDRFVFSVDKSVSTAYLQISSLKAEDTAVYYCARGNWDDYWGQGTTVTVSSGGGGSGGGGSGGGGSGGGGSDVVMTQSPDSLAVSLGERATINCRASKSISKDLAWYQQKPGQPPKLLIYSGSTLQSGVPDRFSGSGSGTDFTLTISSLQAEDVAVYYCQQHNKYPYTFGGGTKVEIKTTTPAPRPPTPAPTIASQPLSLRPEACRPAAGGAVHTRGLDFACDIYIWAPLAGTCGVLLLSLVITLYCKRGRKKLLYIFKQPFMRPVQTTQEEDGCSCRFPEEEEGGCELRVKFSRSADAPAYKQGQNQLYNELNLGRREEYDVLDKRRGRDPEMGGKPRRKNPQEGLYNELQKDKMAEAYSEIGMKGERRRGKGHDGLYQGLSTATKDTYDALHMQALPPR

SEQ ID NO: 2137 - protein, 486 aa, Artificial Sequence
  source: /note="Description of Artificial Sequence: Synthetic polypeptide"
MALPVTALLLPLALLLHAARPDVQLTQSPSFLSASVGDRVTITCRASKSISKDLAWYQQKPGKAPKLLIYSGSTLQSGVPSRFSGSGSGTEFTLTISSLQPEDFATYYCQQHNKYPYTFGGGTKVEIKGGGGSGGGGSGGGGSGGGGSQVQLVQSGSELKKPGASVKVSCKASGYTFTSYWMNWVRQAPGQGLEWMGRIDPYDSETHYNQKFKDRFVFSVDKSVSTAYLQISSLKAEDTAVYYCARGNWDDYWGQGTTVTVSSTTTPAPRPPTPAPTIASQPLSLRPEACRPAAGGAVHTRGLDFACDIYIWAPLAGTCGVLLLSLVITLYCKRGRKKLLYIFKQPFMRPVQTTQEEDGCSCRFPEEEEGGCELRVKFSRSADAPAYKQGQNQLYNELNLGRREEYDVLDKRRGRDPEMGGKPRRKNPQEGLYNELQKDKMAEAYSEIGMKGERRRGKGHDGLYQGLSTATKDTYDALHMQALPPR

SEQ ID NO: 2138 - protein, 486 aa, Artificial Sequence
  source: /note="Description of Artificial Sequence: Synthetic polypeptide"
MALPVTALLLPLALLLHAARPEVVLTQSPATLSLSPGERATLSCRASKSISKDLAWYQQKPGQAPRLLIYSGSTLQSGIPARFSGSGSGTDFTLTISSLEPEDFAVYYCQQHNKYPYTFGGGTKVEIKGGGGSGGGGSGGGGSGGGGSQVQLVQSGSELKKPGASVKVSCKASGYTFTSYWMNWVRQAPGQGLEWMGRIDPYDSETHYNQKFKDRFVFSVDKSVSTAYLQISSLKAEDTAVYYCARGNWDDYWGQGTTVTVSSTTTPAPRPPTPAPTIASQPLSLRPEACRPAAGGAVHTRGLDFACDIYIWAPLAGTCGVLLLSLVITLYCKRGRKKLLYIFKQPFMRPVQTTQEEDGCSCRFPEEEEGGCELRVKFSRSADAPAYKQGQNQLYNELNLGRREEYDVLDKRRGRDPEMGGKPRRKNPQEGLYNELQKDKMAEAYSEIGMKGERRRGKGHDGLYQGLSTATKDTYDALHMQALPPR

SEQ ID NO: 2139 - protein, 486 aa, Artificial Sequence
  source: /note="Description of Artificial Sequence: Synthetic polypeptide"
MALPVTALLLPLALLLHAARPDVVMTQSPAFLSVTPGEKVTITCRASKSISKDLAWYQQKPDQAPKLLIYSGSTLQSGVPSRFSGSGSGTDFTFTISSLEAEDAATYYCQQHNKYPYTFGGGTKVEIKGGGGSGGGGSGGGGSGGGGSQVQLVQSGSELKKPGASVKVSCKASGYTFTSYWMNWVRQAPGQGLEWMGRIDPYDSETHYNQKFKDRFVFSVDKSVSTAYLQISSLKAEDTAVYYCARGNWDDYWGQGTTVTVSSTTTPAPRPPTPAPTIASQPLSLRPEACRPAAGGAVHTRGLDFACDIYIWAPLAGTCGVLLLSLVITLYCKRGRKKLLYIFKQPFMRPVQTTQEEDGCSCRFPEEEEGGCELRVKFSRSADAPAYKQGQNQLYNELNLGRREEYDVLDKRRGRDPEMGGKPRRKNPQEGLYNELQKDKMAEAYSEIGMKGERRRGKGHDGLYQGLSTATKDTYDALHMQALPPR

SEQ ID NO: 2140 - protein, 486 aa, Artificial Sequence
  source: /note="Description of Artificial Sequence: Synthetic polypeptide"
MALPVTALLLPLALLLHAARPDVVMTQSPDSLAVSLGERATINCRASKSISKDLAWYQQKPGQPPKLLIYSGSTLQSGVPDRFSGSGSGTDFTLTISSLQAEDVAVYYCQQHNKYPYTFGGGTKVEIKGGGGSGGGGSGGGGSGGGGSQVQLVQSGSELKKPGASVKVSCKASGYTFTSYWMNWVRQAPGQGLEWMGRIDPYDSETHYNQKFKDRFVFSVDKSVSTAYLQISSLKAEDTAVYYCARGNWDDYWGQGTTVTVSSTTTPAPRPPTPAPTIASQPLSLRPEACRPAAGGAVHTRGLDFACDIYIWAPLAGTCGVLLLSLVITLYCKRGRKKLLYIFKQPFMRPVQTTQEEDGCSCRFPEEEEGGCELRVKFSRSADAPAYKQGQNQLYNELNLGRREEYDVLDKRRGRDPEMGGKPRRKNPQEGLYNELQKDKMAEAYSEIGMKGERRRGKGHDGLYQGLSTATKDTYDALHMQALPPR

SEQ ID NO: 2141 - protein, 486 aa, Artificial Sequence
  source: /note="Description of Artificial Sequence: Synthetic polypeptide"
MALPVTALLLPLALLLHAARPEVQLVQSGAEVKKPGESLRISCKGSGYTFTSYWMNWVRQMPGKGLEWMGRIDPYDSETHYNQKFKDHVTISVDKSISTAYLQWSSLKASDTAMYYCARGNWDDYWGQGTTVTVSSGGGGSGGGGSGGGGSGGGGSDVQLTQSPSFLSASVGDRVTITCRASKSISKDLAWYQQKPGKAPKLLIYSGSTLQSGVPSRFSGSGSGTEFTLTISSLQPEDFATYYCQQHNKYPYTFGGGTKVEIKTTTPAPRPPTPAPTIASQPLSLRPEACRPAAGGAVHTRGLDFACDIYIWAPLAGTCGVLLLSLVITLYCKRGRKKLLYIFKQPFMRPVQTTQEEDGCSCRFPEEEEGGCELRVKFSRSADAPAYKQGQNQLYNELNLGRREEYDVLDKRRGRDPEMGGKPRRKNPQEGLYNELQKDKMAEAYSEIGMKGERRRGKGHDGLYQGLSTATKDTYDALHMQALPPR

SEQ ID NO: 2142 - protein, 486 aa, Artificial Sequence
  source: /note="Description of Artificial Sequence: Synthetic polypeptide"
MALPVTALLLPLALLLHAARPEVQLVQSGAEVKKPGESLRISCKGSGYTFTSYWMNWVRQMPGKGLEWMGRIDPYDSETHYNQKFKDHVTISVDKSISTAYLQWSSLKASDTAMYYCARGNWDDYWGQGTTVTVSSGGGGSGGGGSGGGGSGGGGSEVVLTQSPATLSLSPGERATLSCRASKSISKDLAWYQQKPGQAPRLLIYSGSTLQSGIPARFSGSGSGTDFTLTISSLEPEDFAVYYCQQHNKYPYTFGGGTKVEIKTTTPAPRPPTPAPTIASQPLSLRPEACRPAAGGAVHTRGLDFACDIYIWAPLAGTCGVLLLSLVITLYCKRGRKKLLYIFKQPFMRPVQTTQEEDGCSCRFPEEEEGGCELRVKFSRSADAPAYKQGQNQLYNELNLGRREEYDVLDKRRGRDPEMGGKPRRKNPQEGLYNELQKDKMAEAYSEIGMKGERRRGKGHDGLYQGLSTATKDTYDALHMQALPPR

SEQ ID NO: 2143 - protein, 486 aa, Artificial Sequence
  source: /note="Description of Artificial Sequence: Synthetic polypeptide"
MALPVTALLLPLALLLHAARPEVQLVQSGAEVKKPGESLRISCKGSGYTFTSYWMNWVRQMPGKGLEWMGRIDPYDSETHYNQKFKDHVTISVDKSISTAYLQWSSLKASDTAMYYCARGNWDDYWGQGTTVTVSSGGGGSGGGGSGGGGSGGGGSDVVMTQSPAFLSVTPGEKVTITCRASKSISKDLAWYQQKPDQAPKLLIYSGSTLQSGVPSRFSGSGSGTDFTFTISSLEAEDAATYYCQQHNKYPYTFGGGTKVEIKTTTPAPRPPTPAPTIASQPLSLRPEACRPAAGGAVHTRGLDFACDIYIWAPLAGTCGVLLLSLVITLYCKRGRKKLLYIFKQPFMRPVQTTQEEDGCSCRFPEEEEGGCELRVKFSRSADAPAYKQGQNQLYNELNLGRREEYDVLDKRRGRDPEMGGKPRRKNPQEGLYNELQKDKMAEAYSEIGMKGERRRGKGHDGLYQGLSTATKDTYDALHMQALPPR

SEQ ID NO: 2144 - protein, 486 aa, Artificial Sequence
  source: /note="Description of Artificial Sequence: Synthetic polypeptide"
MALPVTALLLPLALLLHAARPEVQLVQSGAEVKKPGESLRISCKGSGYTFTSYWMNWVRQMPGKGLEWMGRIDPYDSETHYNQKFKDHVTISVDKSISTAYLQWSSLKASDTAMYYCARGNWDDYWGQGTTVTVSSGGGGSGGGGSGGGGSGGGGSDVVMTQSPDSLAVSLGERATINCRASKSISKDLAWYQQKPGQPPKLLIYSGSTLQSGVPDRFSGSGSGTDFTLTISSLQAEDVAVYYCQQHNKYPYTFGGGTKVEIKTTTPAPRPPTPAPTIASQPLSLRPEACRPAAGGAVHTRGLDFACDIYIWAPLAGTCGVLLLSLVITLYCKRGRKKLLYIFKQPFMRPVQTTQEEDGCSCRFPEEEEGGCELRVKFSRSADAPAYKQGQNQLYNELNLGRREEYDVLDKRRGRDPEMGGKPRRKNPQEGLYNELQKDKMAEAYSEIGMKGERRRGKGHDGLYQGLSTATKDTYDALHMQALPPR

SEQ ID NO: 2145 - protein, 486 aa, Artificial Sequence
  source: /note="Description of Artificial Sequence: Synthetic polypeptide"
MALPVTALLLPLALLLHAARPDVQLTQSPSFLSASVGDRVTITCRASKSISKDLAWYQQKPGKAPKLLIYSGSTLQSGVPSRFSGSGSGTEFTLTISSLQPEDFATYYCQQHNKYPYTFGGGTKVEIKGGGGSGGGGSGGGGSGGGGSEVQLVQSGAEVKKPGESLRISCKGSGYTFTSYWMNWVRQMPGKGLEWMGRIDPYDSETHYNQKFKDHVTISVDKSISTAYLQWSSLKASDTAMYYCARGNWDDYWGQGTTVTVSSTTTPAPRPPTPAPTIASQPLSLRPEACRPAAGGAVHTRGLDFACDIYIWAPLAGTCGVLLLSLVITLYCKRGRKKLLYIFKQPFMRPVQTTQEEDGCSCRFPEEEEGGCELRVKFSRSADAPAYKQGQNQLYNELNLGRREEYDVLDKRRGRDPEMGGKPRRKNPQEGLYNELQKDKMAEAYSEIGMKGERRRGKGHDGLYQGLSTATKDTYDALHMQALPPR

SEQ ID NO: 2146 - protein, 486 aa, Artificial Sequence
  source: /note="Description of Artificial Sequence: Synthetic polypeptide"
MALPVTALLLPLALLLHAARPEVVLTQSPATLSLSPGERATLSCRASKSISKDLAWYQQKPGQAPRLLIYSGSTLQSGIPARFSGSGSGTDFTLTISSLEPEDFAVYYCQQHNKYPYTFGGGTKVEIKGGGGSGGGGSGGGGSGGGGSEVQLVQSGAEVKKPGESLRISCKGSGYTFTSYWMNWVRQMPGKGLEWMGRIDPYDSETHYNQKFKDHVTISVDKSISTAYLQWSSLKASDTAMYYCARGNWDDYWGQGTTVTVSSTTTPAPRPPTPAPTIASQPLSLRPEACRPAAGGAVHTRGLDFACDIYIWAPLAGTCGVLLLSLVITLYCKRGRKKLLYIFKQPFMRPVQTTQEEDGCSCRFPEEEEGGCELRVKFSRSADAPAYKQGQNQLYNELNLGRREEYDVLDKRRGRDPEMGGKPRRKNPQEGLYNELQKDKMAEAYSEIGMKGERRRGKGHDGLYQGLSTATKDTYDALHMQALPPR

SEQ ID NO: 2147 - protein, 486 aa, Artificial Sequence
  source: /note="Description of Artificial Sequence: Synthetic polypeptide"
MALPVTALLLPLALLLHAARPDVVMTQSPAFLSVTPGEKVTITCRASKSISKDLAWYQQKPDQAPKLLIYSGSTLQSGVPSRFSGSGSGTDFTFTISSLEAEDAATYYCQQHNKYPYTFGGGTKVEIKGGGGSGGGGSGGGGSGGGGSEVQLVQSGAEVKKPGESLRISCKGSGYTFTSYWMNWVRQMPGKGLEWMGRIDPYDSETHYNQKFKDHVTISVDKSISTAYLQWSSLKASDTAMYYCARGNWDDYWGQGTTVTVSSTTTPAPRPPTPAPTIASQPLSLRPEACRPAAGGAVHTRGLDFACDIYIWAPLAGTCGVLLLSLVITLYCKRGRKKLLYIFKQPFMRPVQTTQEEDGCSCRFPEEEEGGCELRVKFSRSADAPAYKQGQNQLYNELNLGRREEYDVLDKRRGRDPEMGGKPRRKNPQEGLYNELQKDKMAEAYSEIGMKGERRRGKGHDGLYQGLSTATKDTYDALHMQALPPR

SEQ ID NO: 2148 - protein, 486 aa, Artificial Sequence
  source: /note="Description of Artificial Sequence: Synthetic polypeptide"
MALPVTALLLPLALLLHAARPDVVMTQSPDSLAVSLGERATINCRASKSISKDLAWYQQKPGQPPKLLIYSGSTLQSGVPDRFSGSGSGTDFTLTISSLQAEDVAVYYCQQHNKYPYTFGGGTKVEIKGGGGSGGGGSGGGGSGGGGSEVQLVQSGAEVKKPGESLRISCKGSGYTFTSYWMNWVRQMPGKGLEWMGRIDPYDSETHYNQKFKDHVTISVDKSISTAYLQWSSLKASDTAMYYCARGNWDDYWGQGTTVTVSSTTTPAPRPPTPAPTIASQPLSLRPEACRPAAGGAVHTRGLDFACDIYIWAPLAGTCGVLLLSLVITLYCKRGRKKLLYIFKQPFMRPVQTTQEEDGCSCRFPEEEEGGCELRVKFSRSADAPAYKQGQNQLYNELNLGRREEYDVLDKRRGRDPEMGGKPRRKNPQEGLYNELQKDKMAEAYSEIGMKGERRRGKGHDGLYQGLSTATKDTYDALHMQALPPR

SEQ ID NO: 2149 - protein, 486 aa, Artificial Sequence
  source: /note="Description of Artificial Sequence: Synthetic polypeptide"
MALPVTALLLPLALLLHAARPEVQLVESGGGLVQPGGSLRLSCAASGYTFTSYWMNWVRQAPGKGLVWVSRIDPYDSETHYNQKFKDRFTISVDKAKSTAYLQMNSLRAEDTAVYYCARGNWDDYWGQGTTVTVSSGGGGSGGGGSGGGGSGGGGSDVQLTQSPSFLSASVGDRVTITCRASKSISKDLAWYQQKPGKAPKLLIYSGSTLQSGVPSRFSGSGSGTEFTLTISSLQPEDFATYYCQQHNKYPYTFGGGTKVEIKTTTPAPRPPTPAPTIASQPLSLRPEACRPAAGGAVHTRGLDFACDIYIWAPLAGTCGVLLLSLVITLYCKRGRKKLLYIFKQPFMRPVQTTQEEDGCSCRFPEEEEGGCELRVKFSRSADAPAYKQGQNQLYNELNLGRREEYDVLDKRRGRDPEMGGKPRRKNPQEGLYNELQKDKMAEAYSEIGMKGERRRGKGHDGLYQGLSTATKDTYDALHMQALPPR

SEQ ID NO: 2150 - protein, 486 aa, Artificial Sequence
  source: /note="Description of Artificial Sequence: Synthetic polypeptide"
MALPVTALLLPLALLLHAARPEVQLVESGGGLVQPGGSLRLSCAASGYTFTSYWMNWVRQAPGKGLVWVSRIDPYDSETHYNQKFKDRFTISVDKAKSTAYLQMNSLRAEDTAVYYCARGNWDDYWGQGTTVTVSSGGGGSGGGGSGGGGSGGGGSEVVLTQSPATLSLSPGERATLSCRASKSISKDLAWYQQKPGQAPRLLIYSGSTLQSGIPARFSGSGSGTDFTLTISSLEPEDFAVYYCQQHNKYPYTFGGGTKVEIKTTTPAPRPPTPAPTIASQPLSLRPEACRPAAGGAVHTRGLDFACDIYIWAPLAGTCGVLLLSLVITLYCKRGRKKLLYIFKQPFMRPVQTTQEEDGCSCRFPEEEEGGCELRVKFSRSADAPAYKQGQNQLYNELNLGRREEYDVLDKRRGRDPEMGGKPRRKNPQEGLYNELQKDKMAEAYSEIGMKGERRRGKGHDGLYQGLSTATKDTYDALHMQALPPR

SEQ ID NO: 2151 - protein, 486 aa, Artificial Sequence
  source: /note="Description of Artificial Sequence: Synthetic polypeptide"
MALPVTALLLPLALLLHAARPEVQLVESGGGLVQPGGSLRLSCAASGYTFTSYWMNWVRQAPGKGLVWVSRIDPYDSETHYNQKFKDRFTISVDKAKSTAYLQMNSLRAEDTAVYYCARGNWDDYWGQGTTVTVSSGGGGSGGGGSGGGGSGGGGSDVVMTQSPAFLSVTPGEKVTITCRASKSISKDLAWYQQKPDQAPKLLIYSGSTLQSGVPSRFSGSGSGTDFTFTISSLEAEDAATYYCQQHNKYPYTFGGGTKVEIKTTTPAPRPPTPAPTIASQPLSLRPEACRPAAGGAVHTRGLDFACDIYIWAPLAGTCGVLLLSLVITLYCKRGRKKLLYIFKQPFMRPVQTTQEEDGCSCRFPEEEEGGCELRVKFSRSADAPAYKQGQNQLYNELNLGRREEYDVLDKRRGRDPEMGGKPRRKNPQEGLYNELQKDKMAEAYSEIGMKGERRRGKGHDGLYQGLSTATKDTYDALHMQALPPR

SEQ ID NO: 2152 - protein, 486 aa, Artificial Sequence
  source: /note="Description of Artificial Sequence: Synthetic polypeptide"
MALPVTALLLPLALLLHAARPEVQLVESGGGLVQPGGSLRLSCAASGYTFTSYWMNWVRQAPGKGLVWVSRIDPYDSETHYNQKFKDRFTISVDKAKSTAYLQMNSLRAEDTAVYYCARGNWDDYWGQGTTVTVSSGGGGSGGGGSGGGGSGGGGSDVVMTQSPDSLAVSLGERATINCRASKSISKDLAWYQQKPGQPPKLLIYSGSTLQSGVPDRFSGSGSGTDFTLTISSLQAEDVAVYYCQQHNKYPYTFGGGTKVEIKTTTPAPRPPTPAPTIASQPLSLRPEACRPAAGGAVHTRGLDFACDIYIWAPLAGTCGVLLLSLVITLYCKRGRKKLLYIFKQPFMRPVQTTQEEDGCSCRFPEEEEGGCELRVKFSRSADAPAYKQGQNQLYNELNLGRREEYDVLDKRRGRDPEMGGKPRRKNPQEGLYNELQKDKMAEAYSEIGMKGERRRGKGHDGLYQGLSTATKDTYDALHMQALPPR

SEQ ID NO: 2153 - protein, 486 aa, Artificial Sequence
  source: /note="Description of Artificial Sequence: Synthetic polypeptide"
MALPVTALLLPLALLLHAARPDVQLTQSPSFLSASVGDRVTITCRASKSISKDLAWYQQKPGKAPKLLIYSGSTLQSGVPSRFSGSGSGTEFTLTISSLQPEDFATYYCQQHNKYPYTFGGGTKVEIKGGGGSGGGGSGGGGSGGGGSEVQLVESGGGLVQPGGSLRLSCAASGYTFTSYWMNWVRQAPGKGLVWVSRIDPYDSETHYNQKFKDRFTISVDKAKSTAYLQMNSLRAEDTAVYYCARGNWDDYWGQGTTVTVSSTTTPAPRPPTPAPTIASQPLSLRPEACRPAAGGAVHTRGLDFACDIYIWAPLAGTCGVLLLSLVITLYCKRGRKKLLYIFKQPFMRPVQTTQEEDGCSCRFPEEEEGGCELRVKFSRSADAPAYKQGQNQLYNELNLGRREEYDVLDKRRGRDPEMGGKPRRKNPQEGLYNELQKDKMAEAYSEIGMKGERRRGKGHDGLYQGLSTATKDTYDALHMQALPPR

SEQ ID NO: 2154 - protein, 486 aa, Artificial Sequence
  source: /note="Description of Artificial Sequence: Synthetic polypeptide"
MALPVTALLLPLALLLHAARPEVVLTQSPATLSLSPGERATLSCRASKSISKDLAWYQQKPGQAPRLLIYSGSTLQSGIPARFSGSGSGTDFTLTISSLEPEDFAVYYCQQHNKYPYTFGGGTKVEIKGGGGSGGGGSGGGGSGGGGSEVQLVESGGGLVQPGGSLRLSCAASGYTFTSYWMNWVRQAPGKGLVWVSRIDPYDSETHYNQKFKDRFTISVDKAKSTAYLQMNSLRAEDTAVYYCARGNWDDYWGQGTTVTVSSTTTPAPRPPTPAPTIASQPLSLRPEACRPAAGGAVHTRGLDFACDIYIWAPLAGTCGVLLLSLVITLYCKRGRKKLLYIFKQPFMRPVQTTQEEDGCSCRFPEEEEGGCELRVKFSRSADAPAYKQGQNQLYNELNLGRREEYDVLDKRRGRDPEMGGKPRRKNPQEGLYNELQKDKMAEAYSEIGMKGERRRGKGHDGLYQGLSTATKDTYDALHMQALPPR

SEQ ID NO: 2155 - protein, 486 aa, Artificial Sequence
  source: /note="Description of Artificial Sequence: Synthetic polypeptide"
MALPVTALLLPLALLLHAARPDVVMTQSPAFLSVTPGEKVTITCRASKSISKDLAWYQQKPDQAPKLLIYSGSTLQSGVPSRFSGSGSGTDFTFTISSLEAEDAATYYCQQHNKYPYTFGGGTKVEIKGGGGSGGGGSGGGGSGGGGSEVQLVESGGGLVQPGGSLRLSCAASGYTFTSYWMNWVRQAPGKGLVWVSRIDPYDSETHYNQKFKDRFTISVDKAKSTAYLQMNSLRAEDTAVYYCARGNWDDYWGQGTTVTVSSTTTPAPRPPTPAPTIASQPLSLRPEACRPAAGGAVHTRGLDFACDIYIWAPLAGTCGVLLLSLVITLYCKRGRKKLLYIFKQPFMRPVQTTQEEDGCSCRFPEEEEGGCELRVKFSRSADAPAYKQGQNQLYNELNLGRREEYDVLDKRRGRDPEMGGKPRRKNPQEGLYNELQKDKMAEAYSEIGMKGERRRGKGHDGLYQGLSTATKDTYDALHMQALPPR

SEQ ID NO: 2156 - protein, 486 aa, Artificial Sequence
  source: /note="Description of Artificial Sequence: Synthetic polypeptide"
MALPVTALLLPLALLLHAARPDVVMTQSPDSLAVSLGERATINCRASKSISKDLAWYQQKPGQPPKLLIYSGSTLQSGVPDRFSGSGSGTDFTLTISSLQAEDVAVYYCQQHNKYPYTFGGGTKVEIKGGGGSGGGGSGGGGSGGGGSEVQLVESGGGLVQPGGSLRLSCAASGYTFTSYWMNWVRQAPGKGLVWVSRIDPYDSETHYNQKFKDRFTISVDKAKSTAYLQMNSLRAEDTAVYYCARGNWDDYWGQGTTVTVSSTTTPAPRPPTPAPTIASQPLSLRPEACRPAAGGAVHTRGLDFACDIYIWAPLAGTCGVLLLSLVITLYCKRGRKKLLYIFKQPFMRPVQTTQEEDGCSCRFPEEEEGGCELRVKFSRSADAPAYKQGQNQLYNELNLGRREEYDVLDKRRGRDPEMGGKPRRKNPQEGLYNELQKDKMAEAYSEIGMKGERRRGKGHDGLYQGLSTATKDTYDALHMQALPPR

SEQ ID NO: 2157 - protein, 264 aa, Artificial Sequence
  source: /note="Description of Artificial Sequence: Synthetic polypeptide"
MALPVTALLLPLALLLHAARPQVQLVQSGAEVKKPGASVKVSCKASGYTFTGYYMHWVRQAPGQGLEWMGWINPNSGGTNYAQKFQGRVTMTRDTSISTAYMELSRLRSDDTAVYYCARDMNILATVPFDIWGQGTMVTVSSGGGGSGGGGSGGGGSDIQMTQSPSSLSASVGDRVTITCRASQSISTYLNWYQQKPGKAPNLLIYAAFSLQSGVPSRFSGSGSGTDFTLTINSLQPEDFATYYCQQGDSVPLTFGGGTKLEIK

SEQ ID NO: 2158 - protein, 264 aa, Artificial Sequence
  source: /note="Description of Artificial Sequence: Synthetic polypeptide"
MALPVTALLLPLALLLHAARPQVQLVQSGAEVKKPGASVKVSCKASGYTFTGYYMHWVRQAPGQGLEWMGWINPNSGGTNYAQKFQGRVTLTRDTSISTVYMELSRLRSDDTAVYYCARDMNILATVPFDIWGQGTMVTVSSGGGGSGGGGSGGGGSDIQMTQSPSSLSASVGDRVTITCRASQSISSYLNWYQQKPGKAPKLLIYAASSLQSGVPSRFSGSGSGTDFTLTVNSLQPEDFATYYCQQGDSVPLTFGGGTRLEIK

SEQ ID NO: 2159 - protein, 264 aa, Artificial Sequence
  source: /note="Description of Artificial Sequence: Synthetic polypeptide"
MALPVTALLLPLALLLHAARPQVQLVQSGAEVKKPGASVKVSCKASGYIFTGYYIHWVRQAPGQGLEWMGWINPNSGGTNYAQKFQGRVTMTRDTSISTAYMELSGLRSDDPAVYYCARDMNILATVPFDIWGQGTLVTVSSGGGGSGGGGSGGGGSDIQLTQSPSSLSASVGDRVTITCRASQSISSYLNWYQQKPGKAPKLLIYAASSLQSGVPSRFSGSGSGTDFTLTVNSLQPEDFATYYCQQGDSVPLTFGGGTKVEIK

SEQ ID NO: 2160 - protein, 266 aa, Artificial Sequence
  source: /note="Description of Artificial Sequence: Synthetic polypeptide"
MALPVTALLLPLALLLHAARPQVQLQQSGAEVKKSGASVKVSCKASGYTFTDYYMHWLRQAPGQGLEWMGWINPNSGDTNYAQKFQGRVTLTRDTSISTVYMELSRLRSDDTAVYYCARDMNILATVPFDIWGQGTMVTVSSASGGGGSGGRASGGGGSDIQMTQSPSSLSASVGDRVTITCRASQSISSYLNWYQQKPGKAPKLLIYAASSLQSGVPSRFSGSGSGTDFTLTISSLQPEDFATYYCQQGDSVPLTFGGGTKVEIK

SEQ ID NO: 2161-2183 - skipped (23 entries)

SEQ ID NO: 2184 - protein, 263 aa, Artificial Sequence
  source: /note="Description of Artificial Sequence: Synthetic polypeptide"
MALPVTALLLPLALLLHAARPQVQLVQSGAEVKKPGASVKVSCKASGYTFTSYWMNWVRQAPGQGLEWMGRIDPYDSETHYNQKFKDRVTMTVDKSTSTAYMELSSLRSEDTAVYYCARGNWDDYWGQGTTVTVSSGGGGSGGGGSGGGGSGGGGSDVQLTQSPSFLSASVGDRVTITCRASKSISKDLAWYQQKPGKAPKLLIYSGSTLQSGVPSRFSGSGSGTEFTLTISSLQPEDFATYYCQQHNKYPYTFGGGTKVEIK

SEQ ID NO: 2185 - protein, 263 aa, Artificial Sequence
  source: /note="Description of Artificial Sequence: Synthetic polypeptide"
MALPVTALLLPLALLLHAARPQVQLVQSGAEVKKPGASVKVSCKASGYTFTSYWMNWVRQAPGQGLEWMGRIDPYDSETHYNQKFKDRVTMTVDKSTSTAYMELSSLRSEDTAVYYCARGNWDDYWGQGTTVTVSSGGGGSGGGGSGGGGSGGGGSEVVLTQSPATLSLSPGERATLSCRASKSISKDLAWYQQKPGQAPRLLIYSGSTLQSGIPARFSGSGSGTDFTLTISSLEPEDFAVYYCQQHNKYPYTFGGGTKVEIK

SEQ ID NO: 2186 - protein, 263 aa, Artificial Sequence
  source: /note="Description of Artificial Sequence: Synthetic polypeptide"
MALPVTALLLPLALLLHAARPQVQLVQSGAEVKKPGASVKVSCKASGYTFTSYWMNWVRQAPGQGLEWMGRIDPYDSETHYNQKFKDRVTMTVDKSTSTAYMELSSLRSEDTAVYYCARGNWDDYWGQGTTVTVSSGGGGSGGGGSGGGGSGGGGSDVVMTQSPAFLSVTPGEKVTITCRASKSISKDLAWYQQKPDQAPKLLIYSGSTLQSGVPSRFSGSGSGTDFTFTISSLEAEDAATYYCQQHNKYPYTFGGGTKVEIK

SEQ ID NO: 2187 - protein, 263 aa, Artificial Sequence
  source: /note="Description of Artificial Sequence: Synthetic polypeptide"
MALPVTALLLPLALLLHAARPQVQLVQSGAEVKKPGASVKVSCKASGYTFTSYWMNWVRQAPGQGLEWMGRIDPYDSETHYNQKFKDRVTMTVDKSTSTAYMELSSLRSEDTAVYYCARGNWDDYWGQGTTVTVSSGGGGSGGGGSGGGGSGGGGSDVVMTQSPDSLAVSLGERATINCRASKSISKDLAWYQQKPGQPPKLLIYSGSTLQSGVPDRFSGSGSGTDFTLTISSLQAEDVAVYYCQQHNKYPYTFGGGTKVEIK

SEQ ID NO: 2188 - protein, 263 aa, Artificial Sequence
  source: /note="Description of Artificial Sequence: Synthetic polypeptide"
MALPVTALLLPLALLLHAARPDVQLTQSPSFLSASVGDRVTITCRASKSISKDLAWYQQKPGKAPKLLIYSGSTLQSGVPSRFSGSGSGTEFTLTISSLQPEDFATYYCQQHNKYPYTFGGGTKVEIKGGGGSGGGGSGGGGSGGGGSQVQLVQSGAEVKKPGASVKVSCKASGYTFTSYWMNWVRQAPGQGLEWMGRIDPYDSETHYNQKFKDRVTMTVDKSTSTAYMELSSLRSEDTAVYYCARGNWDDYWGQGTTVTVSS

SEQ ID NO: 2189 - protein, 263 aa, Artificial Sequence
  source: /note="Description of Artificial Sequence: Synthetic polypeptide"
MALPVTALLLPLALLLHAARPEVVLTQSPATLSLSPGERATLSCRASKSISKDLAWYQQKPGQAPRLLIYSGSTLQSGIPARFSGSGSGTDFTLTISSLEPEDFAVYYCQQHNKYPYTFGGGTKVEIKGGGGSGGGGSGGGGSGGGGSQVQLVQSGAEVKKPGASVKVSCKASGYTFTSYWMNWVRQAPGQGLEWMGRIDPYDSETHYNQKFKDRVTMTVDKSTSTAYMELSSLRSEDTAVYYCARGNWDDYWGQGTTVTVSS

SEQ ID NO: 2190 - protein, 263 aa, Artificial Sequence
  source: /note="Description of Artificial Sequence: Synthetic polypeptide"
MALPVTALLLPLALLLHAARPDVVMTQSPAFLSVTPGEKVTITCRASKSISKDLAWYQQKPDQAPKLLIYSGSTLQSGVPSRFSGSGSGTDFTFTISSLEAEDAATYYCQQHNKYPYTFGGGTKVEIKGGGGSGGGGSGGGGSGGGGSQVQLVQSGAEVKKPGASVKVSCKASGYTFTSYWMNWVRQAPGQGLEWMGRIDPYDSETHYNQKFKDRVTMTVDKSTSTAYMELSSLRSEDTAVYYCARGNWDDYWGQGTTVTVSS

SEQ ID NO: 2191 - protein, 263 aa, Artificial Sequence
  source: /note="Description of Artificial Sequence: Synthetic polypeptide"
MALPVTALLLPLALLLHAARPDVVMTQSPDSLAVSLGERATINCRASKSISKDLAWYQQKPGQPPKLLIYSGSTLQSGVPDRFSGSGSGTDFTLTISSLQAEDVAVYYCQQHNKYPYTFGGGTKVEIKGGGGSGGGGSGGGGSGGGGSQVQLVQSGAEVKKPGASVKVSCKASGYTFTSYWMNWVRQAPGQGLEWMGRIDPYDSETHYNQKFKDRVTMTVDKSTSTAYMELSSLRSEDTAVYYCARGNWDDYWGQGTTVTVSS

SEQ ID NO: 2192 - protein, 263 aa, Artificial Sequence
  source: /note="Description of Artificial Sequence: Synthetic polypeptide"
MALPVTALLLPLALLLHAARPQVQLVQSGSELKKPGASVKVSCKASGYTFTSYWMNWVRQAPGQGLEWMGRIDPYDSETHYNQKFKDRFVFSVDKSVSTAYLQISSLKAEDTAVYYCARGNWDDYWGQGTTVTVSSGGGGSGGGGSGGGGSGGGGSDVQLTQSPSFLSASVGDRVTITCRASKSISKDLAWYQQKPGKAPKLLIYSGSTLQSGVPSRFSGSGSGTEFTLTISSLQPEDFATYYCQQHNKYPYTFGGGTKVEIK

SEQ ID NO: 2193 - protein, 263 aa, Artificial Sequence
  source: /note="Description of Artificial Sequence: Synthetic polypeptide"
MALPVTALLLPLALLLHAARPQVQLVQSGSELKKPGASVKVSCKASGYTFTSYWMNWVRQAPGQGLEWMGRIDPYDSETHYNQKFKDRFVFSVDKSVSTAYLQISSLKAEDTAVYYCARGNWDDYWGQGTTVTVSSGGGGSGGGGSGGGGSGGGGSEVVLTQSPATLSLSPGERATLSCRASKSISKDLAWYQQKPGQAPRLLIYSGSTLQSGIPARFSGSGSGTDFTLTISSLEPEDFAVYYCQQHNKYPYTFGGGTKVEIK

SEQ ID NO: 2194 - protein, 263 aa, Artificial Sequence
  source: /note="Description of Artificial Sequence: Synthetic polypeptide"
MALPVTALLLPLALLLHAARPQVQLVQSGSELKKPGASVKVSCKASGYTFTSYWMNWVRQAPGQGLEWMGRIDPYDSETHYNQKFKDRFVFSVDKSVSTAYLQISSLKAEDTAVYYCARGNWDDYWGQGTTVTVSSGGGGSGGGGSGGGGSGGGGSDVVMTQSPAFLSVTPGEKVTITCRASKSISKDLAWYQQKPDQAPKLLIYSGSTLQSGVPSRFSGSGSGTDFTFTISSLEAEDAATYYCQQHNKYPYTFGGGTKVEIK

SEQ ID NO: 2195 - protein, 263 aa, Artificial Sequence
  source: /note="Description of Artificial Sequence: Synthetic polypeptide"
MALPVTALLLPLALLLHAARPQVQLVQSGSELKKPGASVKVSCKASGYTFTSYWMNWVRQAPGQGLEWMGRIDPYDSETHYNQKFKDRFVFSVDKSVSTAYLQISSLKAEDTAVYYCARGNWDDYWGQGTTVTVSSGGGGSGGGGSGGGGSGGGGSDVVMTQSPDSLAVSLGERATINCRASKSISKDLAWYQQKPGQPPKLLIYSGSTLQSGVPDRFSGSGSGTDFTLTISSLQAEDVAVYYCQQHNKYPYTFGGGTKVEIK

SEQ ID NO: 2196 - protein, 263 aa, Artificial Sequence
  source: /note="Description of Artificial Sequence: Synthetic polypeptide"
MALPVTALLLPLALLLHAARPDVQLTQSPSFLSASVGDRVTITCRASKSISKDLAWYQQKPGKAPKLLIYSGSTLQSGVPSRFSGSGSGTEFTLTISSLQPEDFATYYCQQHNKYPYTFGGGTKVEIKGGGGSGGGGSGGGGSGGGGSQVQLVQSGSELKKPGASVKVSCKASGYTFTSYWMNWVRQAPGQGLEWMGRIDPYDSETHYNQKFKDRFVFSVDKSVSTAYLQISSLKAEDTAVYYCARGNWDDYWGQGTTVTVSS

SEQ ID NO: 2197 - protein, 263 aa, Artificial Sequence
  source: /note="Description of Artificial Sequence: Synthetic polypeptide"
MALPVTALLLPLALLLHAARPEVVLTQSPATLSLSPGERATLSCRASKSISKDLAWYQQKPGQAPRLLIYSGSTLQSGIPARFSGSGSGTDFTLTISSLEPEDFAVYYCQQHNKYPYTFGGGTKVEIKGGGGSGGGGSGGGGSGGGGSQVQLVQSGSELKKPGASVKVSCKASGYTFTSYWMNWVRQAPGQGLEWMGRIDPYDSETHYNQKFKDRFVFSVDKSVSTAYLQISSLKAEDTAVYYCARGNWDDYWGQGTTVTVSS

SEQ ID NO: 2198 - protein, 263 aa, Artificial Sequence
  source: /note="Description of Artificial Sequence: Synthetic polypeptide"
MALPVTALLLPLALLLHAARPDVVMTQSPAFLSVTPGEKVTITCRASKSISKDLAWYQQKPDQAPKLLIYSGSTLQSGVPSRFSGSGSGTDFTFTISSLEAEDAATYYCQQHNKYPYTFGGGTKVEIKGGGGSGGGGSGGGGSGGGGSQVQLVQSGSELKKPGASVKVSCKASGYTFTSYWMNWVRQAPGQGLEWMGRIDPYDSETHYNQKFKDRFVFSVDKSVSTAYLQISSLKAEDTAVYYCARGNWDDYWGQGTTVTVSS

SEQ ID NO: 2199 - protein, 263 aa, Artificial Sequence
  source: /note="Description of Artificial Sequence: Synthetic polypeptide"
MALPVTALLLPLALLLHAARPDVVMTQSPDSLAVSLGERATINCRASKSISKDLAWYQQKPGQPPKLLIYSGSTLQSGVPDRFSGSGSGTDFTLTISSLQAEDVAVYYCQQHNKYPYTFGGGTKVEIKGGGGSGGGGSGGGGSGGGGSQVQLVQSGSELKKPGASVKVSCKASGYTFTSYWMNWVRQAPGQGLEWMGRIDPYDSETHYNQKFKDRFVFSVDKSVSTAYLQISSLKAEDTAVYYCARGNWDDYWGQGTTVTVSS

SEQ ID NO: 2200 - protein, 263 aa, Artificial Sequence
  source: /note="Description of Artificial Sequence: Synthetic polypeptide"
MALPVTALLLPLALLLHAARPEVQLVQSGAEVKKPGESLRISCKGSGYTFTSYWMNWVRQMPGKGLEWMGRIDPYDSETHYNQKFKDHVTISVDKSISTAYLQWSSLKASDTAMYYCARGNWDDYWGQGTTVTVSSGGGGSGGGGSGGGGSGGGGSDVQLTQSPSFLSASVGDRVTITCRASKSISKDLAWYQQKPGKAPKLLIYSGSTLQSGVPSRFSGSGSGTEFTLTISSLQPEDFATYYCQQHNKYPYTFGGGTKVEIK

SEQ ID NO: 2201 - protein, 263 aa, Artificial Sequence
  source: /note="Description of Artificial Sequence: Synthetic polypeptide"
MALPVTALLLPLALLLHAARPEVQLVQSGAEVKKPGESLRISCKGSGYTFTSYWMNWVRQMPGKGLEWMGRIDPYDSETHYNQKFKDHVTISVDKSISTAYLQWSSLKASDTAMYYCARGNWDDYWGQGTTVTVSSGGGGSGGGGSGGGGSGGGGSEVVLTQSPATLSLSPGERATLSCRASKSISKDLAWYQQKPGQAPRLLIYSGSTLQSGIPARFSGSGSGTDFTLTISSLEPEDFAVYYCQQHNKYPYTFGGGTKVEIK

SEQ ID NO: 2202 - protein, 263 aa, Artificial Sequence
  source: /note="Description of Artificial Sequence: Synthetic polypeptide"
MALPVTALLLPLALLLHAARPEVQLVQSGAEVKKPGESLRISCKGSGYTFTSYWMNWVRQMPGKGLEWMGRIDPYDSETHYNQKFKDHVTISVDKSISTAYLQWSSLKASDTAMYYCARGNWDDYWGQGTTVTVSSGGGGSGGGGSGGGGSGGGGSDVVMTQSPAFLSVTPGEKVTITCRASKSISKDLAWYQQKPDQAPKLLIYSGSTLQSGVPSRFSGSGSGTDFTFTISSLEAEDAATYYCQQHNKYPYTFGGGTKVEIK

SEQ ID NO: 2203 - protein, 263 aa, Artificial Sequence
  source: /note="Description of Artificial Sequence: Synthetic polypeptide"
MALPVTALLLPLALLLHAARPEVQLVQSGAEVKKPGESLRISCKGSGYTFTSYWMNWVRQMPGKGLEWMGRIDPYDSETHYNQKFKDHVTISVDKSISTAYLQWSSLKASDTAMYYCARGNWDDYWGQGTTVTVSSGGGGSGGGGSGGGGSGGGGSDVVMTQSPDSLAVSLGERATINCRASKSISKDLAWYQQKPGQPPKLLIYSGSTLQSGVPDRFSGSGSGTDFTLTISSLQAEDVAVYYCQQHNKYPYTFGGGTKVEIK

SEQ ID NO: 2204 - protein, 263 aa, Artificial Sequence
  source: /note="Description of Artificial Sequence: Synthetic polypeptide"
MALPVTALLLPLALLLHAARPDVQLTQSPSFLSASVGDRVTITCRASKSISKDLAWYQQKPGKAPKLLIYSGSTLQSGVPSRFSGSGSGTEFTLTISSLQPEDFATYYCQQHNKYPYTFGGGTKVEIKGGGGSGGGGSGGGGSGGGGSEVQLVQSGAEVKKPGESLRISCKGSGYTFTSYWMNWVRQMPGKGLEWMGRIDPYDSETHYNQKFKDHVTISVDKSISTAYLQWSSLKASDTAMYYCARGNWDDYWGQGTTVTVSS

SEQ ID NO: 2205 - protein, 263 aa, Artificial Sequence
  source: /note="Description of Artificial Sequence: Synthetic polypeptide"
MALPVTALLLPLALLLHAARPEVVLTQSPATLSLSPGERATLSCRASKSISKDLAWYQQKPGQAPRLLIYSGSTLQSGIPARFSGSGSGTDFTLTISSLEPEDFAVYYCQQHNKYPYTFGGGTKVEIKGGGGSGGGGSGGGGSGGGGSEVQLVQSGAEVKKPGESLRISCKGSGYTFTSYWMNWVRQMPGKGLEWMGRIDPYDSETHYNQKFKDHVTISVDKSISTAYLQWSSLKASDTAMYYCARGNWDDYWGQGTTVTVSS

SEQ ID NO: 2206 - protein, 263 aa, Artificial Sequence
  source: /note="Description of Artificial Sequence: Synthetic polypeptide"
MALPVTALLLPLALLLHAARPDVVMTQSPAFLSVTPGEKVTITCRASKSISKDLAWYQQKPDQAPKLLIYSGSTLQSGVPSRFSGSGSGTDFTFTISSLEAEDAATYYCQQHNKYPYTFGGGTKVEIKGGGGSGGGGSGGGGSGGGGSEVQLVQSGAEVKKPGESLRISCKGSGYTFTSYWMNWVRQMPGKGLEWMGRIDPYDSETHYNQKFKDHVTISVDKSISTAYLQWSSLKASDTAMYYCARGNWDDYWGQGTTVTVSS

SEQ ID NO: 2207 - protein, 263 aa, Artificial Sequence
  source: /note="Description of Artificial Sequence: Synthetic polypeptide"
MALPVTALLLPLALLLHAARPDVVMTQSPDSLAVSLGERATINCRASKSISKDLAWYQQKPGQPPKLLIYSGSTLQSGVPDRFSGSGSGTDFTLTISSLQAEDVAVYYCQQHNKYPYTFGGGTKVEIKGGGGSGGGGSGGGGSGGGGSEVQLVQSGAEVKKPGESLRISCKGSGYTFTSYWMNWVRQMPGKGLEWMGRIDPYDSETHYNQKFKDHVTISVDKSISTAYLQWSSLKASDTAMYYCARGNWDDYWGQGTTVTVSS

SEQ ID NO: 2208 - protein, 263 aa, Artificial Sequence
  source: /note="Description of Artificial Sequence: Synthetic polypeptide"
MALPVTALLLPLALLLHAARPEVQLVESGGGLVQPGGSLRLSCAASGYTFTSYWMNWVRQAPGKGLVWVSRIDPYDSETHYNQKFKDRFTISVDKAKSTAYLQMNSLRAEDTAVYYCARGNWDDYWGQGTTVTVSSGGGGSGGGGSGGGGSGGGGSDVQLTQSPSFLSASVGDRVTITCRASKSISKDLAWYQQKPGKAPKLLIYSGSTLQSGVPSRFSGSGSGTEFTLTISSLQPEDFATYYCQQHNKYPYTFGGGTKVEIK

SEQ ID NO: 2209 - protein, 263 aa, Artificial Sequence
  source: /note="Description of Artificial Sequence: Synthetic polypeptide"
MALPVTALLLPLALLLHAARPEVQLVESGGGLVQPGGSLRLSCAASGYTFTSYWMNWVRQAPGKGLVWVSRIDPYDSETHYNQKFKDRFTISVDKAKSTAYLQMNSLRAEDTAVYYCARGNWDDYWGQGTTVTVSSGGGGSGGGGSGGGGSGGGGSEVVLTQSPATLSLSPGERATLSCRASKSISKDLAWYQQKPGQAPRLLIYSGSTLQSGIPARFSGSGSGTDFTLTISSLEPEDFAVYYCQQHNKYPYTFGGGTKVEIK

SEQ ID NO: 2210 - protein, 263 aa, Artificial Sequence
  source: /note="Description of Artificial Sequence: Synthetic polypeptide"
MALPVTALLLPLALLLHAARPEVQLVESGGGLVQPGGSLRLSCAASGYTFTSYWMNWVRQAPGKGLVWVSRIDPYDSETHYNQKFKDRFTISVDKAKSTAYLQMNSLRAEDTAVYYCARGNWDDYWGQGTTVTVSSGGGGSGGGGSGGGGSGGGGSDVVMTQSPAFLSVTPGEKVTITCRASKSISKDLAWYQQKPDQAPKLLIYSGSTLQSGVPSRFSGSGSGTDFTFTISSLEAEDAATYYCQQHNKYPYTFGGGTKVEIK

SEQ ID NO: 2211 - protein, 263 aa, Artificial Sequence
  source: /note="Description of Artificial Sequence: Synthetic polypeptide"
MALPVTALLLPLALLLHAARPEVQLVESGGGLVQPGGSLRLSCAASGYTFTSYWMNWVRQAPGKGLVWVSRIDPYDSETHYNQKFKDRFTISVDKAKSTAYLQMNSLRAEDTAVYYCARGNWDDYWGQGTTVTVSSGGGGSGGGGSGGGGSGGGGSDVVMTQSPDSLAVSLGERATINCRASKSISKDLAWYQQKPGQPPKLLIYSGSTLQSGVPDRFSGSGSGTDFTLTISSLQAEDVAVYYCQQHNKYPYTFGGGTKVEIK

SEQ ID NO: 2212 - protein, 263 aa, Artificial Sequence
  source: /note="Description of Artificial Sequence: Synthetic polypeptide"
MALPVTALLLPLALLLHAARPDVQLTQSPSFLSASVGDRVTITCRASKSISKDLAWYQQKPGKAPKLLIYSGSTLQSGVPSRFSGSGSGTEFTLTISSLQPEDFATYYCQQHNKYPYTFGGGTKVEIKGGGGSGGGGSGGGGSGGGGSEVQLVESGGGLVQPGGSLRLSCAASGYTFTSYWMNWVRQAPGKGLVWVSRIDPYDSETHYNQKFKDRFTISVDKAKSTAYLQMNSLRAEDTAVYYCARGNWDDYWGQGTTVTVSS

SEQ ID NO: 2213 - protein, 263 aa, Artificial Sequence
  source: /note="Description of Artificial Sequence: Synthetic polypeptide"
MALPVTALLLPLALLLHAARPEVVLTQSPATLSLSPGERATLSCRASKSISKDLAWYQQKPGQAPRLLIYSGSTLQSGIPARFSGSGSGTDFTLTISSLEPEDFAVYYCQQHNKYPYTFGGGTKVEIKGGGGSGGGGSGGGGSGGGGSEVQLVESGGGLVQPGGSLRLSCAASGYTFTSYWMNWVRQAPGKGLVWVSRIDPYDSETHYNQKFKDRFTISVDKAKSTAYLQMNSLRAEDTAVYYCARGNWDDYWGQGTTVTVSS

SEQ ID NO: 2214 - protein, 263 aa, Artificial Sequence
  source: /note="Description of Artificial Sequence: Synthetic polypeptide"
MALPVTALLLPLALLLHAARPDVVMTQSPAFLSVTPGEKVTITCRASKSISKDLAWYQQKPDQAPKLLIYSGSTLQSGVPSRFSGSGSGTDFTFTISSLEAEDAATYYCQQHNKYPYTFGGGTKVEIKGGGGSGGGGSGGGGSGGGGSEVQLVESGGGLVQPGGSLRLSCAASGYTFTSYWMNWVRQAPGKGLVWVSRIDPYDSETHYNQKFKDRFTISVDKAKSTAYLQMNSLRAEDTAVYYCARGNWDDYWGQGTTVTVSS

SEQ ID NO: 2215 - protein, 263 aa, Artificial Sequence
  source: /note="Description of Artificial Sequence: Synthetic polypeptide"
MALPVTALLLPLALLLHAARPDVVMTQSPDSLAVSLGERATINCRASKSISKDLAWYQQKPGQPPKLLIYSGSTLQSGVPDRFSGSGSGTDFTLTISSLQAEDVAVYYCQQHNKYPYTFGGGTKVEIKGGGGSGGGGSGGGGSGGGGSEVQLVESGGGLVQPGGSLRLSCAASGYTFTSYWMNWVRQAPGKGLVWVSRIDPYDSETHYNQKFKDRFTISVDKAKSTAYLQMNSLRAEDTAVYYCARGNWDDYWGQGTTVTVSS

SEQ ID NO: 2216 - protein, 121 aa, Artificial Sequence
  source: /note="Description of Artificial Sequence: Synthetic polypeptide"
QVQLVQSGAEVKKPGASVKVSCKASGYTFTGYYMHWVRQAPGQGLEWMGWINPNSGGTNYAQKFQGRVTMTRDTSISTAYMELSRLRSDDTAVYYCARDMNILATVPFDIWGQGTMVTVSS

SEQ ID NO: 2217 - protein, 121 aa, Artificial Sequence
  source: /note="Description of Artificial Sequence: Synthetic polypeptide"
QVQLVQSGAEVKKPGASVKVSCKASGYTFTGYYMHWVRQAPGQGLEWMGWINPNSGGTNYAQKFQGRVTLTRDTSISTVYMELSRLRSDDTAVYYCARDMNILATVPFDIWGQGTMVTVSS

SEQ ID NO: 2218 - protein, 121 aa, Artificial Sequence
  source: /note="Description of Artificial Sequence: Synthetic polypeptide"
QVQLVQSGAEVKKPGASVKVSCKASGYIFTGYYIHWVRQAPGQGLEWMGWINPNSGGTNYAQKFQGRVTMTRDTSISTAYMELSGLRSDDPAVYYCARDMNILATVPFDIWGQGTLVTVSS

SEQ ID NO: 2219 - protein, 121 aa, Artificial Sequence
  source: /note="Description of Artificial Sequence: Synthetic polypeptide"
QVQLQQSGAEVKKSGASVKVSCKASGYTFTDYYMHWLRQAPGQGLEWMGWINPNSGDTNYAQKFQGRVTLTRDTSISTVYMELSRLRSDDTAVYYCARDMNILATVPFDIWGQGTMVTVSS

SEQ ID NO: 2220-2242 - skipped (23 entries)

SEQ ID NO: 2243 - protein, 115 aa, Artificial Sequence
  source: /note="Description of Artificial Sequence: Synthetic polypeptide"
QVQLVQSGAEVKKPGASVKVSCKASGYTFTSYWMNWVRQAPGQGLEWMGRIDPYDSETHYNQKFKDRVTMTVDKSTSTAYMELSSLRSEDTAVYYCARGNWDDYWGQGTTVTVSS

SEQ ID NO: 2244 - protein, 115 aa, Artificial Sequence; identical to SEQ ID NO: 2243
  source: /note="Description of Artificial Sequence: Synthetic polypeptide"

SEQ ID NO: 2245 - protein, 115 aa, Artificial Sequence; identical to SEQ ID NO: 2243
  source: /note="Description of Artificial Sequence: Synthetic polypeptide"

SEQ ID NO: 2246 - protein, 115 aa, Artificial Sequence; identical to SEQ ID NO: 2243
  source: /note="Description of Artificial Sequence: Synthetic polypeptide"

SEQ ID NO: 2247 - protein, 115 aa, Artificial Sequence; identical to SEQ ID NO: 2243
  source: /note="Description of Artificial Sequence: Synthetic polypeptide"

SEQ ID NO: 2248 - protein, 115 aa, Artificial Sequence; identical to SEQ ID NO: 2243
  source: /note="Description of Artificial Sequence: Synthetic polypeptide"

SEQ ID NO: 2249 - protein, 115 aa, Artificial Sequence; identical to SEQ ID NO: 2243
  source: /note="Description of Artificial Sequence: Synthetic polypeptide"

SEQ ID NO: 2250 - protein, 115 aa, Artificial Sequence; identical to SEQ ID NO: 2243
  source: /note="Description of Artificial Sequence: Synthetic polypeptide"

SEQ ID NO: 2251 - protein, 115 aa, Artificial Sequence
  source: /note="Description of Artificial Sequence: Synthetic polypeptide"
QVQLVQSGSELKKPGASVKVSCKASGYTFTSYWMNWVRQAPGQGLEWMGRIDPYDSETHYNQKFKDRFVFSVDKSVSTAYLQISSLKAEDTAVYYCARGNWDDYWGQGTTVTVSS

SEQ ID NO: 2252 - protein, 115 aa, Artificial Sequence; identical to SEQ ID NO: 2251
  source: /note="Description of Artificial Sequence: Synthetic polypeptide"

SEQ ID NO: 2253 - protein, 115 aa, Artificial Sequence; identical to SEQ ID NO: 2251
  source: /note="Description of Artificial Sequence: Synthetic polypeptide"

SEQ ID NO: 2254 - protein, 115 aa, Artificial Sequence; identical to SEQ ID NO: 2251
  source: /note="Description of Artificial Sequence: Synthetic polypeptide"

SEQ ID NO: 2255 - protein, 115 aa, Artificial Sequence; identical to SEQ ID NO: 2251
  source: /note="Description of Artificial Sequence: Synthetic polypeptide"

SEQ ID NO: 2256 - protein, 115 aa, Artificial Sequence; identical to SEQ ID NO: 2251
  source: /note="Description of Artificial Sequence: Synthetic polypeptide"

SEQ ID NO: 2257 - protein, 115 aa, Artificial Sequence; identical to SEQ ID NO: 2251
  source: /note="Description of Artificial Sequence: Synthetic polypeptide"

SEQ ID NO: 2258 - protein, 115 aa, Artificial Sequence; identical to SEQ ID NO: 2251
  source: /note="Description of Artificial Sequence: Synthetic polypeptide"

SEQ ID NO: 2259 - protein, 115 aa, Artificial Sequence
  source: /note="Description of Artificial Sequence: Synthetic polypeptide"
EVQLVQSGAEVKKPGESLRISCKGSGYTFTSYWMNWVRQMPGKGLEWMGRIDPYDSETHYNQKFKDHVTISVDKSISTAYLQWSSLKASDTAMYYCARGNWDDYWGQGTTVTVSS

SEQ ID NO: 2260 - protein, 115 aa, Artificial Sequence; identical to SEQ ID NO: 2259
  source: /note="Description of Artificial Sequence: Synthetic polypeptide"

SEQ ID NO: 2261 - protein, 115 aa, Artificial Sequence; identical to SEQ ID NO: 2259
  source: /note="Description of Artificial Sequence: Synthetic polypeptide"

SEQ ID NO: 2262 - protein, 115 aa, Artificial Sequence; identical to SEQ ID NO: 2259
  source: /note="Description of Artificial Sequence: Synthetic polypeptide"

SEQ ID NO: 2263 - protein, 115 aa, Artificial Sequence; identical to SEQ ID NO: 2259
  source: /note="Description of Artificial Sequence: Synthetic polypeptide"

SEQ ID NO: 2264 - protein, 115 aa, Artificial Sequence; identical to SEQ ID NO: 2259
  source: /note="Description of Artificial Sequence: Synthetic polypeptide"

SEQ ID NO: 2265 - protein, 115 aa, Artificial Sequence; identical to SEQ ID NO: 2259
  source: /note="Description of Artificial Sequence: Synthetic polypeptide"

SEQ ID NO: 2266 - protein, 115 aa, Artificial Sequence; identical to SEQ ID NO: 2259
  source: /note="Description of Artificial Sequence: Synthetic polypeptide"

SEQ ID NO: 2267 - protein, 115 aa, Artificial Sequence
  source: /note="Description of Artificial Sequence: Synthetic polypeptide"
EVQLVESGGGLVQPGGSLRLSCAASGYTFTSYWMNWVRQAPGKGLVWVSRIDPYDSETHYNQKFKDRFTISVDKAKSTAYLQMNSLRAEDTAVYYCARGNWDDYWGQGTTVTVSS

SEQ ID NO: 2268 - protein, 115 aa, Artificial Sequence; identical to SEQ ID NO: 2267
  source: /note="Description of Artificial Sequence: Synthetic polypeptide"

SEQ ID NO: 2269 - protein, 115 aa, Artificial Sequence; identical to SEQ ID NO: 2267
  source: /note="Description of Artificial Sequence: Synthetic polypeptide"

SEQ ID NO: 2270 - protein, 115 aa, Artificial Sequence; identical to SEQ ID NO: 2267
  source: /note="Description of Artificial Sequence: Synthetic polypeptide"

SEQ ID NO: 2271 - protein, 115 aa, Artificial Sequence; identical to SEQ ID NO: 2267
  source: /note="Description of Artificial Sequence: Synthetic polypeptide"

SEQ ID NO: 2272 - protein, 115 aa, Artificial Sequence; identical to SEQ ID NO: 2267
  source: /note="Description of Artificial Sequence: Synthetic polypeptide"

SEQ ID NO: 2273 - protein, 115 aa, Artificial Sequence; identical to SEQ ID NO: 2267
  source: /note="Description of Artificial Sequence: Synthetic polypeptide"

SEQ ID NO: 2274 - protein, 115 aa, Artificial Sequence; identical to SEQ ID NO: 2267
  source: /note="Description of Artificial Sequence: Synthetic polypeptide"

SEQ ID NO: 2275 - protein, 107 aa, Artificial Sequence
  source: /note="Description of Artificial Sequence: Synthetic polypeptide"
DIQMTQSPSSLSASVGDRVTITCRASQSISTYLNWYQQKPGKAPNLLIYAAFSLQSGVPSRFSGSGSGTDFTLTINSLQPEDFATYYCQQGDSVPLTFGGGTKLEIK

SEQ ID NO: 2276 - protein, 107 aa, Artificial Sequence
  source: /note="Description of Artificial Sequence: Synthetic polypeptide"
DIQMTQSPSSLSASVGDRVTITCRASQSISSYLNWYQQKPGKAPKLLIYAASSLQSGVPSRFSGSGSGTDFTLTVNSLQPEDFATYYCQQGDSVPLTFGGGTRLEIK

SEQ ID NO: 2277 - protein, 107 aa, Artificial Sequence
  source: /note="Description of Artificial Sequence: Synthetic polypeptide"
DIQLTQSPSSLSASVGDRVTITCRASQSISSYLNWYQQKPGKAPKLLIYAASSLQSGVPSRFSGSGSGTDFTLTVNSLQPEDFATYYCQQGDSVPLTFGGGTKVEIK

SEQ ID NO: 2278 - protein, 107 aa, Artificial Sequence
  source: /note="Description of Artificial Sequence: Synthetic polypeptide"
DIQMTQSPSSLSASVGDRVTITCRASQSISSYLNWYQQKPGKAPKLLIYAASSLQSGVPSRFSGSGSGTDFTLTISSLQPEDFATYYCQQGDSVPLTFGGGTKVEIK

SEQ ID NO: 2279-2301 - skipped (23 entries)

SEQ ID NO: 2302 - protein, 107 aa, Artificial Sequence
  source: /note="Description of Artificial Sequence: Synthetic polypeptide"
DVQLTQSPSFLSASVGDRVTITCRASKSISKDLAWYQQKPGKAPKLLIYSGSTLQSGVPSRFSGSGSGTEFTLTISSLQPEDFATYYCQQHNKYPYTFGGGTKVEIK

SEQ ID NO: 2303 - protein, 107 aa, Artificial Sequence
  source: /note="Description of Artificial Sequence: Synthetic polypeptide"
EVVLTQSPATLSLSPGERATLSCRASKSISKDLAWYQQKPGQAPRLLIYSGSTLQSGIPARFSGSGSGTDFTLTISSLEPEDFAVYYCQQHNKYPYTFGGGTKVEIK

SEQ ID NO: 2304 - protein, 107 aa, Artificial Sequence
  source: /note="Description of Artificial Sequence: Synthetic polypeptide"
DVVMTQSPAFLSVTPGEKVTITCRASKSISKDLAWYQQKPDQAPKLLIYSGSTLQSGVPSRFSGSGSGTDFTFTISSLEAEDAATYYCQQHNKYPYTFGGGTKVEIK

SEQ ID NO: 2305 - protein, 107 aa, Artificial Sequence
  source: /note="Description of Artificial Sequence: Synthetic polypeptide"
DVVMTQSPDSLAVSLGERATINCRASKSISKDLAWYQQKPGQPPKLLIYSGSTLQSGVPDRFSGSGSGTDFTLTISSLQAEDVAVYYCQQHNKYPYTFGGGTKVEIK

SEQ ID NO: 2306 - protein, 107 aa, Artificial Sequence; identical to SEQ ID NO: 2302
  source: /note="Description of Artificial Sequence: Synthetic polypeptide"

SEQ ID NO: 2307 - protein, 107 aa, Artificial Sequence; identical to SEQ ID NO: 2303
  source: /note="Description of Artificial Sequence: Synthetic polypeptide"

SEQ ID NO: 2308 - protein, 107 aa, Artificial Sequence; identical to SEQ ID NO: 2304
  source: /note="Description of Artificial Sequence: Synthetic polypeptide"

SEQ ID NO: 2309 - protein, 107 aa, Artificial Sequence; identical to SEQ ID NO: 2305
  source: /note="Description of Artificial Sequence: Synthetic polypeptide"

SEQ ID NO: 2310 - protein, 107 aa, Artificial Sequence; identical to SEQ ID NO: 2302
  source: /note="Description of Artificial Sequence: Synthetic polypeptide"

SEQ ID NO: 2311 - protein, 107 aa, Artificial Sequence; identical to SEQ ID NO: 2303
  source: /note="Description of Artificial Sequence: Synthetic polypeptide"

SEQ ID NO: 2312 - protein, 107 aa, Artificial Sequence; identical to SEQ ID NO: 2304
  source: /note="Description of Artificial Sequence: Synthetic polypeptide"

SEQ ID NO: 2313 - protein, 107 aa, Artificial Sequence; identical to SEQ ID NO: 2305
  source: /note="Description of Artificial Sequence: Synthetic polypeptide"

SEQ ID NO: 2314 - protein, 107 aa, Artificial Sequence; identical to SEQ ID NO: 2302
  source: /note="Description of Artificial Sequence: Synthetic polypeptide"

SEQ ID NO: 2315 - protein, 107 aa, Artificial Sequence; identical to SEQ ID NO: 2303
  source: /note="Description of Artificial Sequence: Synthetic polypeptide"

SEQ ID NO: 2316 - protein, 107 aa, Artificial Sequence; identical to SEQ ID NO: 2304
  source: /note="Description of Artificial Sequence: Synthetic polypeptide"

SEQ ID NO: 2317 - protein, 107 aa, Artificial Sequence; identical to SEQ ID NO: 2305
  source: /note="Description of Artificial Sequence: Synthetic polypeptide"

SEQ ID NO: 2318 - protein, 107 aa, Artificial Sequence; identical to SEQ ID NO: 2302
  source: /note="Description of Artificial Sequence: Synthetic polypeptide"

SEQ ID NO: 2319 - protein, 107 aa, Artificial Sequence; identical to SEQ ID NO: 2303
  source: /note="Description of Artificial Sequence: Synthetic polypeptide"

SEQ ID NO: 2320 - protein, 107 aa, Artificial Sequence; identical to SEQ ID NO: 2304
  source: /note="Description of Artificial Sequence: Synthetic polypeptide"

SEQ ID NO: 2321 - protein, 107 aa, Artificial Sequence; identical to SEQ ID NO: 2305
  source: /note="Description of Artificial Sequence: Synthetic polypeptide"

SEQ ID NO: 2322 - protein, 107 aa, Artificial Sequence; identical to SEQ ID NO: 2302
  source: /note="Description of Artificial Sequence: Synthetic polypeptide"

SEQ ID NO: 2323 - protein, 107 aa, Artificial Sequence; identical to SEQ ID NO: 2303
  source: /note="Description of Artificial Sequence: Synthetic polypeptide"

SEQ ID NO: 2324 - protein, 107 aa, Artificial Sequence; identical to SEQ ID NO: 2304
  source: /note="Description of Artificial Sequence: Synthetic polypeptide"

SEQ ID NO: 2325 - protein, 107 aa, Artificial Sequence; identical to SEQ ID NO: 2305
  source: /note="Description of Artificial Sequence: Synthetic polypeptide"

SEQ ID NO: 2326 - protein, 107 aa, Artificial Sequence; identical to SEQ ID NO: 2302
  source: /note="Description of Artificial Sequence: Synthetic polypeptide"

SEQ ID NO: 2327 - protein, 107 aa, Artificial Sequence; identical to SEQ ID NO: 2303
  source: /note="Description of Artificial Sequence: Synthetic polypeptide"

SEQ ID NO: 2328 - protein, 107 aa, Artificial Sequence; identical to SEQ ID NO: 2304
  source: /note="Description of Artificial Sequence: Synthetic polypeptide"

SEQ ID NO: 2329 - protein, 107 aa, Artificial Sequence; identical to SEQ ID NO: 2305
  source: /note="Description of Artificial Sequence: Synthetic polypeptide"

SEQ ID NO: 2330 - protein, 107 aa, Artificial Sequence; identical to SEQ ID NO: 2302
  source: /note="Description of Artificial Sequence: Synthetic polypeptide"

SEQ ID NO: 2331 - protein, 107 aa, Artificial Sequence; identical to SEQ ID NO: 2303
  source: /note="Description of Artificial Sequence: Synthetic polypeptide"

SEQ ID NO: 2332 - protein, 107 aa, Artificial Sequence; identical to SEQ ID NO: 2304
  source: /note="Description of Artificial Sequence: Synthetic polypeptide"

SEQ ID NO: 2333 - protein, 107 aa, Artificial Sequence; identical to SEQ ID NO: 2305
  source: /note="Description of Artificial Sequence: Synthetic polypeptide"

SEQ ID NO: 2334 - protein, 10 aa, Artificial Sequence
  source: /note="Description of Artificial Sequence: Synthetic peptide"
GYTFTDYYMH

SEQ ID NO: 2335 - protein, 10 aa, Artificial Sequence
  source: /note="Description of Artificial Sequence: Synthetic peptide"
GYTFTGYYMH

SEQ ID NO: 2336 - protein, 10 aa, Artificial Sequence
  source: /note="Description of Artificial Sequence: Synthetic peptide"
GYTFTGYYMH

SEQ ID NO: 2337 - protein, 10 aa, Artificial Sequence
  source: /note="Description of Artificial Sequence: Synthetic peptide"
GYIFTGYYIH

SEQ ID NO: 2338-2360 - skipped (23 entries)

SEQ ID NO: 2361 - protein, 10 aa, Artificial Sequence
  source: /note="Description of Artificial Sequence: Synthetic peptide"
GYTFTSYWMN

SEQ ID NO: 2362 - protein, 17 aa, Artificial Sequence
  source: /note="Description of Artificial Sequence: Synthetic peptide"
WINPNSGDTNYAQKFQG

SEQ ID NO: 2363 - protein, 17 aa, Artificial Sequence
  source: /note="Description of Artificial Sequence: Synthetic peptide"
WINPNSGGTNYAQKFQG

SEQ ID NO: 2364 - protein, 17 aa, Artificial Sequence
  source: /note="Description of Artificial Sequence: Synthetic peptide"
WINPNSGGTNYAQKFQG

SEQ ID NO: 2365 - protein, 17 aa, Artificial Sequence
  source: /note="Description of Artificial Sequence: Synthetic peptide"
WINPNSGGTNYAQKFQG

SEQ ID NO: 2366-2388 - skipped (23 entries)

SEQ ID NO: 2389 - protein, 17 aa, Artificial Sequence
  source: /note="Description of Artificial Sequence: Synthetic peptide"
RIDPYDSETHYNQKFKD

SEQ ID NO: 2390 - protein, 12 aa, Artificial Sequence
  source: /note="Description of Artificial Sequence: Synthetic peptide"
DMNILATVPFDI

SEQ ID NO: 2391 - protein, 12 aa, Artificial Sequence
  source: /note="Description of Artificial Sequence: Synthetic peptide"
DMNILATVPFDI

SEQ ID NO: 2392 - protein, 12 aa, Artificial Sequence
  source: /note="Description of Artificial Sequence: Synthetic peptide"
DMNILATVPFDI

SEQ ID NO: 2393 - protein, 12 aa, Artificial Sequence
  source: /note="Description of Artificial Sequence: Synthetic peptide"
DMNILATVPFDI

SEQ ID NO: 2394-2416 - skipped (23 entries)

SEQ ID NO: 2417 - protein, 6 aa, Artificial Sequence
  source: /note="Description of Artificial Sequence: Synthetic peptide"
GNWDDY

SEQ ID NO: 2418 - protein, 11 aa, Artificial Sequence
  source: /note="Description of Artificial Sequence: Synthetic peptide"
RASQSISTYLN

SEQ ID NO: 2419 - protein, 11 aa, Artificial Sequence
  source: /note="Description of Artificial Sequence: Synthetic peptide"
RASQSISSYLN

SEQ ID NO: 2420 - protein, 11 aa, Artificial Sequence
  source: /note="Description of Artificial Sequence: Synthetic peptide"
RASQSISSYLN

SEQ ID NO: 2421 - protein, 11 aa, Artificial Sequence
  source: /note="Description of Artificial Sequence: Synthetic peptide"
RASQSISSYLN

SEQ ID NO: 2422-2444 - skipped (23 entries)

SEQ ID NO: 2445 - protein, 11 aa, Artificial Sequence
  source: /note="Description of Artificial Sequence: Synthetic peptide"
RASKSISKDLA

SEQ ID NO: 2446 - protein, 7 aa, Artificial Sequence
  source: /note="Description of Artificial Sequence: Synthetic peptide"
AASSLQS

SEQ ID NO: 2447 - protein, 7 aa, Artificial Sequence
  source: /note="Description of Artificial Sequence: Synthetic peptide"
AAFSLQS

SEQ ID NO: 2448 - protein, 7 aa, Artificial Sequence
  source: /note="Description of Artificial Sequence: Synthetic peptide"
AASSLQS

SEQ ID NO: 2449 - protein, 7 aa, Artificial Sequence
  source: /note="Description of Artificial Sequence: Synthetic peptide"
AASSLQS

SEQ ID NO: 2450-2472 - skipped (23 entries)

SEQ ID NO: 2473 - protein, 7 aa, Artificial Sequence
  source: /note="Description of Artificial Sequence: Synthetic peptide"
SGSTLQS

SEQ ID NO: 2474 - protein, 9 aa, Artificial Sequence
  source: /note="Description of Artificial Sequence: Synthetic peptide"
QQGDSVPLT

SEQ ID NO: 2475 - protein, 9 aa, Artificial Sequence
  source: /note="Description of Artificial Sequence: Synthetic peptide"
QQGDSVPLT

SEQ ID NO: 2476 - protein, 9 aa, Artificial Sequence
  source: /note="Description of Artificial Sequence: Synthetic peptide"
QQGDSVPLT

SEQ ID NO: 2477 - protein, 9 aa, Artificial Sequence
  source: /note="Description of Artificial Sequence: Synthetic peptide"
QQGDSVPLT

SEQ ID NO: 2478 - protein, 243 aa, Artificial Sequence
  source: /note="Description of Artificial Sequence: Synthetic polypeptide"
QVQLVQSGAEVKKPGASVKVSCKASGYTFTGYYMHWVRQAPGQGLEWMGWINPNSGGTNYAQKFQGRVTMTRDTSISTAYMELSRLRSDDTAVYYCARDMNILATVPFDIWGQGTMVTVSSGGGGSGGGGSGGGGSDIQMTQSPSSLSASVGDRVTITCRASQSISTYLNWYQQKPGKAPNLLIYAAFSLQSGVPSRFSGSGSGTDFTLTINSLQPEDFATYYCQQGDSVPLTFGGGTKLEIK

SEQ ID NO: 2479 - DNA, 729 bp, Artificial Sequence
  source: /note="Description of Artificial Sequence: Synthetic polynucleotide"
caagtgcaactcgtccaaagcggagcggaagtcaagaaacccggagcgagcgtgaaagtgtcctgcaaagcctccggctacacctttacgggctactacatgcactgggtgcgccaggcaccaggacagggtcttgaatggatgggatggatcaaccctaattcgggcggaactaactacgcacagaagttccaggggagagtgactctgactcgggatacctccatctcaactgtctacatggaactctcccgcttgcggtcagatgatacggcagtgtactactgcgcccgcgacatgaatatcctggctaccgtgccgttcgacatctggggacaggggactatggttactgtctcatcgggcggtggaggttcaggaggaggcggctcgggaggcggaggttcggacattcagatgacccagtccccatcctctctgtcggccagcgtcggagatagggtgaccattacctgtcgggcctcgcaaagcatctcctcgtacctcaactggtatcagcaaaagccgggaaaggcgcctaagctgctgatctacgccgcttcgagcttgcaaagcggggtgccatccagattctcgggatcaggctcaggaaccgacttcaccctgaccgtgaacagcctccagccggaggactttgccacttactactgccagcagggagactccgtgccgcttactttcggggggggtacccgcctggagatcaag

SEQ ID NO: 2480 - protein, 243 aa, Artificial Sequence
  source: /note="Description of Artificial Sequence: Synthetic polypeptide"
QVQLVQSGAEVKKPGASVKVSCKASGYTFTGYYMHWVRQAPGQGLEWMGWINPNSGGTNYAQKFQGRVTLTRDTSISTVYMELSRLRSDDTAVYYCARDMNILATVPFDIWGQGTMVTVSSGGGGSGGGGSGGGGSDIQMTQSPSSLSASVGDRVTITCRASQSISSYLNWYQQKPGKAPKLLIYAASSLQSGVPSRFSGSGSGTDFTLTVNSLQPEDFATYYCQQGDSVPLTFGGGTRLEIK

SEQ ID NO: 2481 - DNA, 1760 bp, Artificial Sequence
  source: /note="Description of Artificial Sequence: Synthetic polynucleotide"
atggccctccctgtcaccgccctgctgcttccgctggctcttctgctccacgccgctcggccccaagtgcaactcgtccaaagcggagcggaagtcaagaaacccggagcgagcgtgaaagtgtcctgcaaagcctccggctacacctttacgggctactacatgcactgggtgcgccaggcaccaggacagggtcttgaatggatgggatggatcaaccctaattcgggcggaactaactacgcacagaagttccaggggagagtgactctgactcgggatacctccatctcaactgtctacatggaactctcccgcttgcggtcagatgatacggcagtgtactactgcgcccgcgacatgaatatcctggctaccgtgccgttcgacatctggggacaggggactatggttactgtctcatcgggcggtggaggttcaggaggaggcggctcgggaggcggaggttcggacattcagatgacccagtccccatcctctctgtcggccagcgtcggagatagggtgaccattacctgtcgggcctcgcaaagcatctcctcgtacctcaactggtatcagcaaaagccgggaaaggcgcctaagctgctgatctacgccgcttcgagcttgcaaagcggggtgccatccagattctcgggatcaggctcaggaaccgacttcaccctgaccgtgaacagcctccagccggaggactttgccacttactactgccagcagggagactccgtgccgcttactttcggggggggtacccgcctggagatcaagaccactaccccagcaccgaggccacccaccccggctcctaccatcgcctcccagcctctgtccctgcgtccggaggcatgtagacccgcagctggtggggccgtgcatacccggggtcttgacttcgcctgcgatatctacatttgggcccctctggctggtacttgcggggtcctgctgctttcactcgtgatcactctttactgtaagcgcggtcggaagaagctgctgtacatctttaagcaacccttcatgaggcctgtgcagactactcaagaggaggacggctgttcttgccggttcccagaggaggaggaaggcggctgcgaactgcgcgtgaaattcagccgcagcgcagacgctccagcctacaagcaggggcagaaccagctctacaacgaactcaatcttggtcggagagaggagtacgacgtgctggacaagcggagaggacgggacccagaaatgggcgggaagccgcgcagaaagaatccccaagagggcctgtacaacgagctccaaaaggataagatggcagaagcctatagcgagattggtatgaaaggggaacgcagaagaggcaaaggccacgacggactgtaccagggactcagcaccgccaccaaggacacctatgacgctcttcacatgcaggccctgccgcctcggtaagtcgacagctcgctttcttgctgtccaatttctattaaaggttcctttgttccctaagtccaactactaaactgggggatattatgaagggccttgagcatctggattctgcctaataaaaaacatttattttcattgctgcgtcgagagctcgctttcttgctgtccaatttctattaaaggttcctttgttccctaagtccaactactaaactgggggatattatgaagggccttgagcatctggattctgcctaataaaaaacatttattttcattgctgcctcgacgaattc

SEQ ID NO: 2482 - DNA, 729 bp, Artificial Sequence
  source: /note="Description of Artificial Sequence: Synthetic polynucleotide"
caagtccaactcgttcaatccggcgcagaagtcaagaagccaggagcatcagtgaaagtgtcctgcaaagcctcaggctacatcttcacgggatactacatccactgggtgcgccaggctccgggccagggccttgagtggatgggctggatcaaccctaactctgggggaaccaactacgctcagaagttccaggggagggtcactatgactcgcgatacctccatctccactgcgtacatggaactctcgggactgagatccgacgatcctgccgtgtactactgcgcccgggacatgaacatcttggcgaccgtgccgtttgacatttggggacagggcaccctcgtcactgtgtcgagcggtggaggaggctcggggggtggcggatcaggagggggaggaagcgacatccagctgactcagagcccatcgtcgttgtccgcgtcggtgggggatagagtgaccattacttgccgcgccagccagagcatctcatcatatctgaattggtaccagcagaagcccggaaaggccccaaaactgctgatctacgctgcaagcagcctccaatcgggagtgccgtcacggttctccgggtccggttcgggaactgactttaccctgaccgtgaattcgctgcaaccggaggatttcgccacgtactactgtcagcaaggagactccgtgccgctgaccttcggtggaggcaccaaggtcgaaatcaag

SEQ ID NO: 2483 - protein, 243 aa, Artificial Sequence
  source: /note="Description of Artificial Sequence: Synthetic polypeptide"
QVQLVQSGAEVKKPGASVKVSCKASGYIFTGYYIHWVRQAPGQGLEWMGWINPNSGGTNYAQKFQGRVTMTRDTSISTAYMELSGLRSDDPAVYYCARDMNILATVPFDIWGQGTLVTVSSGGGGSGGGGSGGGGSDIQLTQSPSSLSASVGDRVTITCRASQSISSYLNWYQQKPGKAPKLLIYAASSLQSGVPSRFSGSGSGTDFTLTVNSLQPEDFATYYCQQGDSVPLTFGGGTKVEIK

SEQ ID NO: 2484 - DNA, 735 bp, Artificial Sequence
  source: /note="Description of Artificial Sequence: Synthetic polynucleotide"
caagtccaactccaacagtcaggcgcagaagtgaaaaagagcggtgcatcggtgaaagtgtcatgcaaagcctcgggctacaccttcactgactactatatgcactggctgcggcaggcaccgggacagggacttgagtggatgggatggatcaacccgaattcaggggacactaactacgcgcagaagttccaggggagagtgaccctgacgagggacacctcaatttcgaccgtctacatggaattgtcgcgcctgagatcggacgatactgctgtgtactactgtgcccgcgacatgaacatcctcgcgactgtgccttttgatatctggggacaggggactatggtcaccgtttcctccgcttccggtggcggaggctcgggaggccgggcctccggtggaggaggcagcgacatccagatgactcagagcccttcctcgctgagcgcctcagtgggagatcgcgtgaccatcacttgccgggccagccagtccatttcgtcctacctcaattggtaccagcagaagccgggaaaggcgcccaagctcttgatctacgctgcgagctccctgcaaagcggggtgccgagccgattctcgggttccggctcgggaaccgacttcactctgaccatctcatccctgcaaccagaggactttgccacctactactgccaacaaggagattctgtcccactgacgttcggcggaggaaccaaggtcgaaatcaag

SEQ ID NO: 2485 - protein, 245 aa, Artificial Sequence
  source: /note="Description of Artificial Sequence: Synthetic polypeptide"
QVQLQQSGAEVKKSGASVKVSCKASGYTFTDYYMHWLRQAPGQGLEWMGWINPNSGDTNYAQKFQGRVTLTRDTSISTVYMELSRLRSDDTAVYYCARDMNILATVPFDIWGQGTMVTVSSASGGGGSGGRASGGGGSDIQMTQSPSSLSASVGDRVTITCRASQSISSYLNWYQQKPGKAPKLLIYAASSLQSGVPSRFSGSGSGTDFTLTISSLQPEDFATYYCQQGDSVPLTFGGGTKVEIK

SEQ ID NO: 2486 - protein, 5 aa, Artificial Sequence
  source: /note="Description of Artificial Sequence: Synthetic peptide"
GYYMH

SEQ ID NO: 2487 - protein, 5 aa, Artificial Sequence
  source: /note="Description of Artificial Sequence: Synthetic peptide"
GYYMH

SEQ ID NO: 2488 - protein, 5 aa, Artificial Sequence
  source: /note="Description of Artificial Sequence: Synthetic peptide"
GYYIH

SEQ ID NO: 2489 - protein, 5 aa, Artificial Sequence
  source: /note="Description of Artificial Sequence: Synthetic peptide"
DYYMH

SEQ ID NO: 2490 - protein, 5 aa, Artificial Sequence
  source: /note="Description of Artificial Sequence: Synthetic peptide"
SYWMN

SEQ ID NO: 2491 - protein, 17 aa, Artificial Sequence
  source: /note="Description of Artificial Sequence: Synthetic peptide"
WINPNSGGTNYAQKFQG

SEQ ID NO: 2492 - protein, 17 aa, Artificial Sequence
  source: /note="Description of Artificial Sequence: Synthetic peptide"
WINPNSGGTNYAQKFQG

SEQ ID NO: 2493 - protein, 17 aa, Artificial Sequence
  source: /note="Description of Artificial Sequence: Synthetic peptide"
WINPNSGGTNYAQKFQG

SEQ ID NO: 2494 - protein, 17 aa, Artificial Sequence
  source: /note="Description of Artificial Sequence: Synthetic peptide"
WINPNSGDTNYAQKFQG

SEQ ID NO: 2495 - protein, 17 aa, Artificial Sequence
  source: /note="Description of Artificial Sequence: Synthetic peptide"
RIDPYDSETHYNQKFKD

SEQ ID NO: 2496 - protein, 12 aa, Artificial Sequence
  source: /note="Description of Artificial Sequence: Synthetic peptide"
DMNILATVPFDI

SEQ ID NO: 2497 - protein, 12 aa, Artificial Sequence
  source: /note="Description of Artificial Sequence: Synthetic peptide"
DMNILATVPFDI

SEQ ID NO: 2498 - protein, 12 aa, Artificial Sequence
  source: /note="Description of Artificial Sequence: Synthetic peptide"
DMNILATVPFDI

SEQ ID NO: 2499 - protein, 12 aa, Artificial Sequence
  source: /note="Description of Artificial Sequence: Synthetic peptide"
DMNILATVPFDI

SEQ ID NO: 2500 - protein, 6 aa, Artificial Sequence
  source: /note="Description of Artificial Sequence: Synthetic peptide"
GNWDDY

SEQ ID NO: 2501 - skipped

SEQ ID NO: 2502 - protein, 11 aa, Artificial Sequence
  source: /note="Description of Artificial Sequence: Synthetic peptide"
RASQSISSYLN

SEQ ID NO: 2503 - protein, 11 aa, Artificial Sequence
  source: /note="Description of Artificial Sequence: Synthetic peptide"
RASQSISSYLN

SEQ ID NO: 2504 - protein, 11 aa, Artificial Sequence
  source: /note="Description of Artificial Sequence: Synthetic peptide"
RASQSISSYLN

SEQ ID NO: 2505 - protein, 11 aa, Artificial Sequence
  source: /note="Description of Artificial Sequence: Synthetic peptide"
RASKSISKDLA

SEQ ID NO: 2506 - protein, 7 aa, Artificial Sequence
  source: /note="Description of Artificial Sequence: Synthetic peptide"
AAFSLQS

SEQ ID NO: 2507 - protein, 7 aa, Artificial Sequence
  source: /note="Description of Artificial Sequence: Synthetic peptide"
AASSLQS

SEQ ID NO: 2508 - protein, 7 aa, Artificial Sequence
  source: /note="Description of Artificial Sequence: Synthetic peptide"
AASSLQS

SEQ ID NO: 2509 - protein, 7 aa, Artificial Sequence
  source: /note="Description of Artificial Sequence: Synthetic peptide"
AASSLQS

SEQ ID NO: 2510 - protein, 7 aa, Artificial Sequence
  source: /note="Description of Artificial Sequence: Synthetic peptide"
SGSTLQS

SEQ ID NO: 2511 - protein, 9 aa, Artificial Sequence
  source: /note="Description of Artificial Sequence: Synthetic peptide"
QQGDSVPLT

SEQ ID NO: 2512 - protein, 9 aa, Artificial Sequence
  source: /note="Description of Artificial Sequence: Synthetic peptide"
QQGDSVPLT

SEQ ID NO: 2513 - protein, 9 aa, Artificial Sequence
  source: /note="Description of Artificial Sequence: Synthetic peptide"
QQGDSVPLT

SEQ ID NO: 2514 - protein, 9 aa, Artificial Sequence
  source: /note="Description of Artificial Sequence: Synthetic peptide"
QQGDSVPLT

SEQ ID NO: 2515 - protein, 9 aa, Artificial Sequence
  source: /note="Description of Artificial Sequence: Synthetic peptide"
QQHNKYPYT

SEQ ID NO: 2516 - protein, 7 aa, Artificial Sequence
  source: /note="Description of Artificial Sequence: Synthetic peptide"
GYTFTGY

SEQ ID NO: 2517 - protein, 7 aa, Artificial Sequence
  source: /note="Description of Artificial Sequence: Synthetic peptide"
GYTFTGY

SEQ ID NO: 2518 - protein, 7 aa, Artificial Sequence
  source: /note="Description of Artificial Sequence: Synthetic peptide"
GYIFTGY

SEQ ID NO: 2519 - protein, 7 aa, Artificial Sequence
  source: /note="Description of Artificial Sequence: Synthetic peptide"
GYTFTDY

SEQ ID NO: 2520 - protein, 7 aa, Artificial Sequence
  source: /note="Description of Artificial Sequence: Synthetic peptide"
GYTFTSY

SEQ ID NO: 2521 - protein, 6 aa, Artificial Sequence
  source: /note="Description of Artificial Sequence: Synthetic peptide"
NPNSGG

SEQ ID NO: 2522 - protein, 6 aa, Artificial Sequence
  source: /note="Description of Artificial Sequence: Synthetic peptide"
NPNSGG

SEQ ID NO: 2523 - protein, 6 aa, Artificial Sequence
  source: /note="Description of Artificial Sequence: Synthetic peptide"
NPNSGG

SEQ ID NO: 2524 - protein, 6 aa, Artificial Sequence
  source: /note="Description of Artificial Sequence: Synthetic peptide"
NPNSGD

SEQ ID NO: 2525 - protein, 6 aa, Artificial Sequence
  source: /note="Description of Artificial Sequence: Synthetic peptide"
DPYDSE

SEQ ID NO: 2526 - protein, 12 aa, Artificial Sequence
  source: /note="Description of Artificial Sequence: Synthetic peptide"
DMNILATVPFDI

SEQ ID NO: 2527 - protein, 12 aa, Artificial Sequence
  source: /note="Description of Artificial Sequence: Synthetic peptide"
DMNILATVPFDI

SEQ ID NO: 2528 - protein, 12 aa, Artificial Sequence
  source: /note="Description of Artificial Sequence: Synthetic peptide"
DMNILATVPFDI

SEQ ID NO: 2529 - protein, 12 aa, Artificial Sequence
  source: /note="Description of Artificial Sequence: Synthetic peptide"
DMNILATVPFDI

SEQ ID NO: 2530 - protein, 6 aa, Artificial Sequence
  source: /note="Description of Artificial Sequence: Synthetic peptide"
GNWDDY

SEQ ID NO: 2531 - protein, 7 aa, Artificial Sequence
  source: /note="Description of Artificial Sequence: Synthetic peptide"
SQSISTY

SEQ ID NO: 2532 - protein, 7 aa, Artificial Sequence
  source: /note="Description of Artificial Sequence: Synthetic peptide"
SQSISSY

SEQ ID NO: 2533 - protein, 7 aa, Artificial Sequence
  source: /note="Description of Artificial Sequence: Synthetic peptide"
SQSISSY

SEQ ID NO: 2534 - protein, 7 aa, Artificial Sequence
  source: /note="Description of Artificial Sequence: Synthetic peptide"
SQSISSY

SEQ ID NO: 2535 - protein, 7 aa, Artificial Sequence
  source: /note="Description of Artificial Sequence: Synthetic peptide"
SKSISKD

SEQ ID NO: 2536 - protein, 3 aa, Artificial Sequence
  source: /note="Description of Artificial Sequence: Synthetic peptide"
AAF

SEQ ID NO: 2537 - protein, 3 aa, Artificial Sequence
  source: /note="Description of Artificial Sequence: Synthetic peptide"
AAS

SEQ ID NO: 2538 - protein, 3 aa, Artificial Sequence
  source: /note="Description of Artificial Sequence: Synthetic peptide"
AAS

SEQ ID NO: 2539 - protein, 3 aa, Artificial Sequence
  source: /note="Description of Artificial Sequence: Synthetic peptide"
AAS

SEQ ID NO: 2540 - protein, 3 aa, Artificial Sequence
  source: /note="Description of Artificial Sequence: Synthetic peptide"
SGS

SEQ ID NO: 2541 - protein, 6 aa, Artificial Sequence
  source: /note="Description of Artificial Sequence: Synthetic peptide"
GDSVPL

SEQ ID NO: 2542 - protein, 6 aa, Artificial Sequence
  source: /note="Description of Artificial Sequence: Synthetic peptide"
GDSVPL

SEQ ID NO: 2543 - protein, 6 aa, Artificial Sequence
  source: /note="Description of Artificial Sequence: Synthetic peptide"
GDSVPL

SEQ ID NO: 2544 - protein, 6 aa, Artificial Sequence
  source: /note="Description of Artificial Sequence: Synthetic peptide"
GDSVPL

SEQ ID NO: 2545-2554 - skipped (10 entries)

SEQ ID NO: 2555 - protein, 6 aa, Artificial Sequence
  source: /note="Description of Artificial Sequence: Synthetic peptide"
HNKYPY

SEQ ID NO: 2556 - protein, 242 aa, Artificial Sequence
  source: /note="Description of Artificial Sequence: Synthetic polypeptide"
QVQLVQSGAEVKKPGASVKVSCKASGYTFTSYWMNWVRQAPGQGLEWMGRIDPYDSETHYNQKFKDRVTMTVDKSTSTAYMELSSLRSEDTAVYYCARGNWDDYWGQGTTVTVSSGGGGSGGGGSGGGGSGGGGSDVQLTQSPSFLSASVGDRVTITCRASKSISKDLAWYQQKPGKAPKLLIYSGSTLQSGVPSRFSGSGSGTEFTLTISSLQPEDFATYYCQQHNKYPYTFGGGTKVEIK

SEQ ID NO: 2557 - protein, 242 aa, Artificial Sequence
  source: /note="Description of Artificial Sequence: Synthetic polypeptide"
QVQLVQSGAEVKKPGASVKVSCKASGYTFTSYWMNWVRQAPGQGLEWMGRIDPYDSETHYNQKFKDRVTMTVDKSTSTAYMELSSLRSEDTAVYYCARGNWDDYWGQGTTVTVSSGGGGSGGGGSGGGGSGGGGSEVVLTQSPATLSLSPGERATLSCRASKSISKDLAWYQQKPGQAPRLLIYSGSTLQSGIPARFSGSGSGTDFTLTISSLEPEDFAVYYCQQHNKYPYTFGGGTKVEIK

SEQ ID NO: 2558 - protein, 242 aa, Artificial Sequence
  source: /note="Description of Artificial Sequence: Synthetic polypeptide"
QVQLVQSGAEVKKPGASVKVSCKASGYTFTSYWMNWVRQAPGQGLEWMGRIDPYDSETHYNQKFKDRVTMTVDKSTSTAYMELSSLRSEDTAVYYCARGNWDDYWGQGTTVTVSSGGGGSGGGGSGGGGSGGGGSDVVMTQSPAFLSVTPGEKVTITCRASKSISKDLAWYQQKPDQAPKLLIYSGSTLQSGVPSRFSGSGSGTDFTFTISSLEAEDAATYYCQQHNKYPYTFGGGTKVEIK

SEQ ID NO: 2559 - protein, 242 aa, Artificial Sequence
  source: /note="Description of Artificial Sequence: Synthetic polypeptide"
QVQLVQSGAEVKKPGASVKVSCKASGYTFTSYWMNWVRQAPGQGLEWMGRIDPYDSETHYNQKFKDRVTMTVDKSTSTAYMELSSLRSEDTAVYYCARGNWDDYWGQGTTVTVSSGGGGSGGGGSGGGGSGGGGSDVVMTQSPDSLAVSLGERATINCRASKSISKDLAWYQQKPGQPPKLLIYSGSTLQSGVPDRFSGSGSGTDFTLTISSLQAEDVAVYYCQQHNKYPYTFGGGTKVEIK

SEQ ID NO: 2560 - protein, 242 aa, Artificial Sequence
  source: /note="Description of Artificial Sequence: Synthetic polypeptide"
DVQLTQSPSFLSASVGDRVTITCRASKSISKDLAWYQQKPGKAPKLLIYSGSTLQSGVPSRFSGSGSGTEFTLTISSLQPEDFATYYCQQHNKYPYTFGGGTKVEIKGGGGSGGGGSGGGGSGGGGSQVQLVQSGAEVKKPGASVKVSCKASGYTFTSYWMNWVRQAPGQGLEWMGRIDPYDSETHYNQKFKDRVTMTVDKSTSTAYMELSSLRSEDTAVYYCARGNWDDYWGQGTTVTVSS

SEQ ID NO: 2561 - protein, 242 aa, Artificial Sequence
  source: /note="Description of Artificial Sequence: Synthetic polypeptide"
EVVLTQSPATLSLSPGERATLSCRASKSISKDLAWYQQKPGQAPRLLIYSGSTLQSGIPARFSGSGSGTDFTLTISSLEPEDFAVYYCQQHNKYPYTFGGGTKVEIKGGGGSGGGGSGGGGSGGGGSQVQLVQSGAEVKKPGASVKVSCKASGYTFTSYWMNWVRQAPGQGLEWMGRIDPYDSETHYNQKFKDRVTMTVDKSTSTAYMELSSLRSEDTAVYYCARGNWDDYWGQGTTVTVSS

SEQ ID NO: 2562 - protein, 242 aa, Artificial Sequence
  source: /note="Description of Artificial Sequence: Synthetic polypeptide"
DVVMTQSPAFLSVTPGEKVTITCRASKSISKDLAWYQQKPDQAPKLLIYSGSTLQSGVPSRFSGSGSGTDFTFTISSLEAEDAATYYCQQHNKYPYTFGGGTKVEIKGGGGSGGGGSGGGGSGGGGSQVQLVQSGAEVKKPGASVKVSCKASGYTFTSYWMNWVRQAPGQGLEWMGRIDPYDSETHYNQKFKDRVTMTVDKSTSTAYMELSSLRSEDTAVYYCARGNWDDYWGQGTTVTVSS

SEQ ID NO: 2563 - protein, 242 aa, Artificial Sequence
  source: /note="Description of Artificial Sequence: Synthetic polypeptide"
DVVMTQSPDSLAVSLGERATINCRASKSISKDLAWYQQKPGQPPKLLIYSGSTLQSGVPDRFSGSGSGTDFTLTISSLQAEDVAVYYCQQHNKYPYTFGGGTKVEIKGGGGSGGGGSGGGGSGGGGSQVQLVQSGAEVKKPGASVKVSCKASGYTFTSYWMNWVRQAPGQGLEWMGRIDPYDSETHYNQKFKDRVTMTVDKSTSTAYMELSSLRSEDTAVYYCARGNWDDYWGQGTTVTVSS

SEQ ID NO: 2564 - protein, 242 aa, Artificial Sequence
  source: /note="Description of Artificial Sequence: Synthetic polypeptide"
QVQLVQSGSELKKPGASVKVSCKASGYTFTSYWMNWVRQAPGQGLEWMGRIDPYDSETHYNQKFKDRFVFSVDKSVSTAYLQISSLKAEDTAVYYCARGNWDDYWGQGTTVTVSSGGGGSGGGGSGGGGSGGGGSDVQLTQSPSFLSASVGDRVTITCRASKSISKDLAWYQQKPGKAPKLLIYSGSTLQSGVPSRFSGSGSGTEFTLTISSLQPEDFATYYCQQHNKYPYTFGGGTKVEIK

SEQ ID NO: 2565 - protein, 242 aa, Artificial Sequence
  source: /note="Description of Artificial Sequence: Synthetic polypeptide"
QVQLVQSGSELKKPGASVKVSCKASGYTFTSYWMNWVRQAPGQGLEWMGRIDPYDSETHYNQKFKDRFVFSVDKSVSTAYLQISSLKAEDTAVYYCARGNWDDYWGQGTTVTVSSGGGGSGGGGSGGGGSGGGGSEVVLTQSPATLSLSPGERATLSCRASKSISKDLAWYQQKPGQAPRLLIYSGSTLQSGIPARFSGSGSGTDFTLTISSLEPEDFAVYYCQQHNKYPYTFGGGTKVEIK

SEQ ID NO: 2566 - protein, 242 aa, Artificial Sequence
  source: /note="Description of Artificial Sequence: Synthetic polypeptide"
QVQLVQSGSELKKPGASVKVSCKASGYTFTSYWMNWVRQAPGQGLEWMGRIDPYDSETHYNQKFKDRFVFSVDKSVSTAYLQISSLKAEDTAVYYCARGNWDDYWGQGTTVTVSSGGGGSGGGGSGGGGSGGGGSDVVMTQSPAFLSVTPGEKVTITCRASKSISKDLAWYQQKPDQAPKLLIYSGSTLQSGVPSRFSGSGSGTDFTFTISSLEAEDAATYYCQQHNKYPYTFGGGTKVEIK

SEQ ID NO: 2567 - protein, 242 aa, Artificial Sequence
  source: /note="Description of Artificial Sequence: Synthetic polypeptide"
QVQLVQSGSELKKPGASVKVSCKASGYTFTSYWMNWVRQAPGQGLEWMGRIDPYDSETHYNQKFKDRFVFSVDKSVSTAYLQISSLKAEDTAVYYCARGNWDDYWGQGTTVTVSSGGGGSGGGGSGGGGSGGGGSDVVMTQSPDSLAVSLGERATINCRASKSISKDLAWYQQKPGQPPKLLIYSGSTLQSGVPDRFSGSGSGTDFTLTISSLQAEDVAVYYCQQHNKYPYTFGGGTKVEIK

SEQ ID NO: 2568 - protein, 242 aa, Artificial Sequence
  source: /note="Description of Artificial Sequence: Synthetic polypeptide"
DVQLTQSPSFLSASVGDRVTITCRASKSISKDLAWYQQKPGKAPKLLIYSGSTLQSGVPSRFSGSGSGTEFTLTISSLQPEDFATYYCQQHNKYPYTFGGGTKVEIKGGGGSGGGGSGGGGSGGGGSQVQLVQSGSELKKPGASVKVSCKASGYTFTSYWMNWVRQAPGQGLEWMGRIDPYDSETHYNQKFKDRFVFSVDKSVSTAYLQISSLKAEDTAVYYCARGNWDDYWGQGTTVTVSS

SEQ ID NO: 2569 - protein, 242 aa, Artificial Sequence
  source: /note="Description of Artificial Sequence: Synthetic polypeptide"
EVVLTQSPATLSLSPGERATLSCRASKSISKDLAWYQQKPGQAPRLLIYSGSTLQSGIPARFSGSGSGTDFTLTISSLEPEDFAVYYCQQHNKYPYTFGGGTKVEIKGGGGSGGGGSGGGGSGGGGSQVQLVQSGSELKKPGASVKVSCKASGYTFTSYWMNWVRQAPGQGLEWMGRIDPYDSETHYNQKFKDRFVFSVDKSVSTAYLQISSLKAEDTAVYYCARGNWDDYWGQGTTVTVSS

SEQ ID NO: 2570 - protein, 242 aa, Artificial Sequence
  source: /note="Description of Artificial Sequence: Synthetic polypeptide"
DVVMTQSPAFLSVTPGEKVTITCRASKSISKDLAWYQQKPDQAPKLLIYSGSTLQSGVPSRFSGSGSGTDFTFTISSLEAEDAATYYCQQHNKYPYTFGGGTKVEIKGGGGSGGGGSGGGGSGGGGSQVQLVQSGSELKKPGASVKVSCKASGYTFTSYWMNWVRQAPGQGLEWMGRIDPYDSETHYNQKFKDRFVFSVDKSVSTAYLQISSLKAEDTAVYYCARGNWDDYWGQGTTVTVSS

SEQ ID NO: 2571 - protein, 242 aa, Artificial Sequence
  source: /note="Description of Artificial Sequence: Synthetic polypeptide"
DVVMTQSPDSLAVSLGERATINCRASKSISKDLAWYQQKPGQPPKLLIYSGSTLQSGVPDRFSGSGSGTDFTLTISSLQAEDVAVYYCQQHNKYPYTFGGGTKVEIKGGGGSGGGGSGGGGSGGGGSQVQLVQSGSELKKPGASVKVSCKASGYTFTSYWMNWVRQAPGQGLEWMGRIDPYDSETHYNQKFKDRFVFSVDKSVSTAYLQISSLKAEDTAVYYCARGNWDDYWGQGTTVTVSS

SEQ ID NO: 2572 - protein, 242 aa, Artificial Sequence
  source: /note="Description of Artificial Sequence: Synthetic polypeptide"
EVQLVQSGAEVKKPGESLRISCKGSGYTFTSYWMNWVRQMPGKGLEWMGRIDPYDSETHYNQKFKDHVTISVDKSISTAYLQWSSLKASDTAMYYCARGNWDDYWGQGTTVTVSSGGGGSGGGGSGGGGSGGGGSDVQLTQSPSFLSASVGDRVTITCRASKSISKDLAWYQQKPGKAPKLLIYSGSTLQSGVPSRFSGSGSGTEFTLTISSLQPEDFATYYCQQHNKYPYTFGGGTKVEIK

SEQ ID NO: 2573 - protein, 242 aa, Artificial Sequence
  source: /note="Description of Artificial Sequence: Synthetic polypeptide"
EVQLVQSGAEVKKPGESLRISCKGSGYTFTSYWMNWVRQMPGKGLEWMGRIDPYDSETHYNQKFKDHVTISVDKSISTAYLQWSSLKASDTAMYYCARGNWDDYWGQGTTVTVSSGGGGSGGGGSGGGGSGGGGSEVVLTQSPATLSLSPGERATLSCRASKSISKDLAWYQQKPGQAPRLLIYSGSTLQSGIPARFSGSGSGTDFTLTISSLEPEDFAVYYCQQHNKYPYTFGGGTKVEIK

SEQ ID NO: 2574 - protein, 242 aa, Artificial Sequence
  source: /note="Description of Artificial Sequence: Synthetic polypeptide"
EVQLVQSGAEVKKPGESLRISCKGSGYTFTSYWMNWVRQMPGKGLEWMGRIDPYDSETHYNQKFKDHVTISVDKSISTAYLQWSSLKASDTAMYYCARGNWDDYWGQGTTVTVSSGGGGSGGGGSGGGGSGGGGSDVVMTQSPAFLSVTPGEKVTITCRASKSISKDLAWYQQKPDQAPKLLIYSGSTLQSGVPSRFSGSGSGTDFTFTISSLEAEDAATYYCQQHNKYPYTFGGGTKVEIK

SEQ ID NO: 2575 - protein, 242 aa, Artificial Sequence
  source: /note="Description of Artificial Sequence: Synthetic polypeptide"
EVQLVQSGAEVKKPGESLRISCKGSGYTFTSYWMNWVRQMPGKGLEWMGRIDPYDSETHYNQKFKDHVTISVDKSISTAYLQWSSLKASDTAMYYCARGNWDDYWGQGTTVTVSSGGGGSGGGGSGGGGSGGGGSDVVMTQSPDSLAVSLGERATINCRASKSISKDLAWYQQKPGQPPKLLIYSGSTLQSGVPDRFSGSGSGTDFTLTISSLQAEDVAVYYCQQHNKYPYTFGGGTKVEIK

SEQ ID NO: 2576 - protein, 242 aa, Artificial Sequence
  source: /note="Description of Artificial Sequence: Synthetic polypeptide"
DVQLTQSPSFLSASVGDRVTITCRASKSISKDLAWYQQKPGKAPKLLIYSGSTLQSGVPSRFSGSGSGTEFTLTISSLQPEDFATYYCQQHNKYPYTFGGGTKVEIKGGGGSGGGGSGGGGSGGGGSEVQLVQSGAEVKKPGESLRISCKGSGYTFTSYWMNWVRQMPGKGLEWMGRIDPYDSETHYNQKFKDHVTISVDKSISTAYLQWSSLKASDTAMYYCARGNWDDYWGQGTTVTVSS

SEQ ID NO: 2577 - protein, 242 aa, Artificial Sequence
  source: /note="Description of Artificial Sequence: Synthetic polypeptide"
EVVLTQSPATLSLSPGERATLSCRASKSISKDLAWYQQKPGQAPRLLIYSGSTLQSGIPARFSGSGSGTDFTLTISSLEPEDFAVYYCQQHNKYPYTFGGGTKVEIKGGGGSGGGGSGGGGSGGGGSEVQLVQSGAEVKKPGESLRISCKGSGYTFTSYWMNWVRQMPGKGLEWMGRIDPYDSETHYNQKFKDHVTISVDKSISTAYLQWSSLKASDTAMYYCARGNWDDYWGQGTTVTVSS

SEQ ID NO: 2578 - protein, 242 aa, Artificial Sequence
  source: /note="Description of Artificial Sequence: Synthetic polypeptide"
DVVMTQSPAFLSVTPGEKVTITCRASKSISKDLAWYQQKPDQAPKLLIYSGSTLQSGVPSRFSGSGSGTDFTFTISSLEAEDAATYYCQQHNKYPYTFGGGTKVEIKGGGGSGGGGSGGGGSGGGGSEVQLVQSGAEVKKPGESLRISCKGSGYTFTSYWMNWVRQMPGKGLEWMGRIDPYDSETHYNQKFKDHVTISVDKSISTAYLQWSSLKASDTAMYYCARGNWDDYWGQGTTVTVSS

SEQ ID NO: 2579 - protein, 242 aa, Artificial Sequence
  source: /note="Description of Artificial Sequence: Synthetic polypeptide"
DVVMTQSPDSLAVSLGERATINCRASKSISKDLAWYQQKPGQPPKLLIYSGSTLQSGVPDRFSGSGSGTDFTLTISSLQAEDVAVYYCQQHNKYPYTFGGGTKVEIKGGGGSGGGGSGGGGSGGGGSEVQLVQSGAEVKKPGESLRISCKGSGYTFTSYWMNWVRQMPGKGLEWMGRIDPYDSETHYNQKFKDHVTISVDKSISTAYLQWSSLKASDTAMYYCARGNWDDYWGQGTTVTVSS

SEQ ID NO: 2580 - protein, 242 aa, Artificial Sequence
  source: /note="Description of Artificial Sequence: Synthetic polypeptide"
EVQLVESGGGLVQPGGSLRLSCAASGYTFTSYWMNWVRQAPGKGLVWVSRIDPYDSETHYNQKFKDRFTISVDKAKSTAYLQMNSLRAEDTAVYYCARGNWDDYWGQGTTVTVSSGGGGSGGGGSGGGGSGGGGSDVQLTQSPSFLSASVGDRVTITCRASKSISKDLAWYQQKPGKAPKLLIYSGSTLQSGVPSRFSGSGSGTEFTLTISSLQPEDFATYYCQQHNKYPYTFGGGTKVEIK

SEQ ID NO: 2581 - protein, 242 aa, Artificial Sequence
  source: /note="Description of Artificial Sequence: Synthetic polypeptide"
EVQLVESGGGLVQPGGSLRLSCAASGYTFTSYWMNWVRQAPGKGLVWVSRIDPYDSETHYNQKFKDRFTISVDKAKSTAYLQMNSLRAEDTAVYYCARGNWDDYWGQGTTVTVSSGGGGSGGGGSGGGGSGGGGSEVVLTQSPATLSLSPGERATLSCRASKSISKDLAWYQQKPGQAPRLLIYSGSTLQSGIPARFSGSGSGTDFTLTISSLEPEDFAVYYCQQHNKYPYTFGGGTKVEIK

SEQ ID NO: 2582 - protein, 242 aa, Artificial Sequence
  source: /note="Description of Artificial Sequence: Synthetic polypeptide"
EVQLVESGGGLVQPGGSLRLSCAASGYTFTSYWMNWVRQAPGKGLVWVSRIDPYDSETHYNQKFKDRFTISVDKAKSTAYLQMNSLRAEDTAVYYCARGNWDDYWGQGTTVTVSSGGGGSGGGGSGGGGSGGGGSDVVMTQSPAFLSVTPGEKVTITCRASKSISKDLAWYQQKPDQAPKLLIYSGSTLQSGVPSRFSGSGSGTDFTFTISSLEAEDAATYYCQQHNKYPYTFGGGTKVEIK

SEQ ID NO: 2583 - protein, 242 aa, Artificial Sequence
  source: /note="Description of Artificial Sequence: Synthetic polypeptide"
EVQLVESGGGLVQPGGSLRLSCAASGYTFTSYWMNWVRQAPGKGLVWVSRIDPYDSETHYNQKFKDRFTISVDKAKSTAYLQMNSLRAEDTAVYYCARGNWDDYWGQGTTVTVSSGGGGSGGGGSGGGGSGGGGSDVVMTQSPDSLAVSLGERATINCRASKSISKDLAWYQQKPGQPPKLLIYSGSTLQSGVPDRFSGSGSGTDFTLTISSLQAEDVAVYYCQQHNKYPYTFGGGTKVEIK

SEQ ID NO: 2584 - protein, 242 aa, Artificial Sequence
  source: /note="Description of Artificial Sequence: Synthetic polypeptide"
DVQLTQSPSFLSASVGDRVTITCRASKSISKDLAWYQQKPGKAPKLLIYSGSTLQSGVPSRFSGSGSGTEFTLTISSLQPEDFATYYCQQHNKYPYTFGGGTKVEIKGGGGSGGGGSGGGGSGGGGSEVQLVESGGGLVQPGGSLRLSCAASGYTFTSYWMNWVRQAPGKGLVWVSRIDPYDSETHYNQKFKDRFTISVDKAKSTAYLQMNSLRAEDTAVYYCARGNWDDYWGQGTTVTVSS

SEQ ID NO: 2585 - protein, 242 aa, Artificial Sequence
  source: /note="Description of Artificial Sequence: Synthetic polypeptide"
EVVLTQSPATLSLSPGERATLSCRASKSISKDLAWYQQKPGQAPRLLIYSGSTLQSGIPARFSGSGSGTDFTLTISSLEPEDFAVYYCQQHNKYPYTFGGGTKVEIKGGGGSGGGGSGGGGSGGGGSEVQLVESGGGLVQPGGSLRLSCAASGYTFTSYWMNWVRQAPGKGLVWVSRIDPYDSETHYNQKFKDRFTISVDKAKSTAYLQMNSLRAEDTAVYYCARGNWDDYWGQGTTVTVSS

SEQ ID NO: 2586 - protein, 242 aa, Artificial Sequence
  source: /note="Description of Artificial Sequence: Synthetic polypeptide"
DVVMTQSPAFLSVTPGEKVTITCRASKSISKDLAWYQQKPDQAPKLLIYSGSTLQSGVPSRFSGSGSGTDFTFTISSLEAEDAATYYCQQHNKYPYTFGGGTKVEIKGGGGSGGGGSGGGGSGGGGSEVQLVESGGGLVQPGGSLRLSCAASGYTFTSYWMNWVRQAPGKGLVWVSRIDPYDSETHYNQKFKDRFTISVDKAKSTAYLQMNSLRAEDTAVYYCARGNWDDYWGQGTTVTVSS

SEQ ID NO: 2587 - protein, 242 aa, Artificial Sequence
  source: /note="Description of Artificial Sequence: Synthetic polypeptide"
DVVMTQSPDSLAVSLGERATINCRASKSISKDLAWYQQKPGQPPKLLIYSGSTLQSGVPDRFSGSGSGTDFTLTISSLQAEDVAVYYCQQHNKYPYTFGGGTKVEIKGGGGSGGGGSGGGGSGGGGSEVQLVESGGGLVQPGGSLRLSCAASGYTFTSYWMNWVRQAPGKGLVWVSRIDPYDSETHYNQKFKDRFTISVDKAKSTAYLQMNSLRAEDTAVYYCARGNWDDYWGQGTTVTVSS

SEQ ID NO: 2588 - DNA, 5000 bp, Artificial Sequence
  source: /note="Description of Artificial Sequence: Synthetic polynucleotide"
  misc_feature (1)..(5000): /note="This sequence may encompass 50-5000 nucleotides"
tttttttttttttttttttttttttttttttttttttttttttttttttttttttttttttttttttttttttttttttttttttttttttttttttttttttttttttttttttttttttttttttttttttttttttttttttttttttttttttttttttttttttttttttttttttttttttttttttttttttttttttttttttttttttttttttttttttttttttttttttttttttttttttttttttttttttttttttttttttttttttttttttttttttttttttttttttttttttttttttttttttttttttttttttttttttttttttttttttttttttttttttttttttttttttttttttttttttttttttttttttttttttttttttttttttttttttttttttttttttttttttttttttttttttttttttttttttttttttttttttttttttttttttttttttttttttttttttttttttttttttttttttttttttttttttttttttttttttttttttttttttttttttttttttttttttttttttttttttttttttttttttttttttttttttttttttttttttttttttttttttttttttttttttttttttttttttttttttttttttttttttttttttttttttttttttttttttttttttttttttttttttttttttttttttttttttttttttttttttttttttttttttttttttttttttttttttttttttttttttttttttttttttttttttttttttttttttttttttttttttttttttttttttttttttttttttttttttttttttttttttttttttttttttttttttttttttttttttttttttttttttttttttttttttttttttttttttttttttttttttttttttttttttttttttttttttttttttttttttttttttttttttttttttttttttttttttttttttttttttttttttttttttttttttttttttttttttttttttttttttttttttttttttttttttttttttttttttttttttttttttttttttttttttttttttttttttttttttttttttttttttttttttttttttttttttttttttttttttttttttttttttttttttttttttttttttttttttttttttttttttttttttttttttttttttttttttttttttttttttttttttttttttttttttttttttttttttttttttttttttttttttttttttttttttttttttttttttttttttttttttttttttttttttttttttttttttttttttttttttttttttttttttttttttttttttttttttttttttttttttttttttttttttttttttttttttttttttttttttttttttttttttttttttttttttttttttttttttttttttttttttttttttttttttttttttttttttttttttttttttttttttttttttttttttttttttttttttttttttttttttttttttttttttttttttttttttttttttttttttttttttttttttttttttttttttttttttttttttttttttttttttttttttttttttttttttttttttttttttttttttttttttttttttttttttttttttttttttttttttttttttttttttttttttttttttttttttttttttttttttttttttttttttttttttttttttttttttttttttttttttttttttttttttttttttttttttttttttttttttttttttttttttttttttttttttttttttttttttttttttttttttttttttttttttttttttttttttttttttttttttttttttttttttttttttttttttttttttttttttttttttttttttttttttttttttttttttttttttttttttttttttttttttttttttttttttttttttttttttttttttttttttttttttttttttttttttttttttttttttttttttttttttttttttttttttttttttttttttttttttttttttttttttttttttttttttttttttttttttttttttttttttttttttttttttttttttttttttttttttttttttttttttttttttttttttttttttttttttttttttttttttttttttttttttttttttttttttttttttttttttttttttttttttttttttttttttttttttttttttttttttttttttttttttttttttttttttttttttttttttttttttttttttttttttttttttttttttttttttttttttttttttttttttttttttttttttttttttttttttttttttttttttttttttttttttttttttttttttttttttttttttttttttttttttttttttttttttttttttttttttttttttttttttttttttttttttttttttttttttttttttttttttttttttttttttttttttttttttttttttttttttttttttttttttttttttttttttttttttttttttttttttttttttttttttttttttttttttttttttttttttttttttttttttttttttttttttttttttttttttttttttttttttttttttttttttttttttttttttttttttttttttttttttttttttttttttttttttttttttttttttttttttttttttttttttttttttttttttttttttttttttttttttttttttttttttttttttttttttttttttttttttttttttttttttttttttttttttttttttttttttttttttttttttttttttttttttttttttttttttttttttttttttttttttttttttttttttttttttttttttttttttttttttttttttttttttttttttttttttttttttttttttttttttttttttttttttttttttttttttttttttttttttttttttttttttttttttttttttttttttttttttttttttttttttttttttttttttttttttttttttttttttttttttttttttttttttttttttttttttttttttttttttttttttttttttttttttttttttttttttttttttttttttttttttttttttttttttttttttttttttttttttttttttttttttttttttttttttttttttttttttttttttttttttttttttttttttttttttttttttttttttttttttttttttttttttttttttttttttttttttttttttttttttttttttttttttttttttttttttttttttttttttttttttttttttttttttttttttttttttttttttttttttttttttttttttttttttttttttttttttttttttttttttttttttttttttttttttttttttttttttttttttttttttttttttttttttttttttttttttttttttttttttttttttttttttttttttttttttttttttttttttttttttttttttttttttttttttttttttttttttttttttttttttttttttttttttttttttttttttttttttttttttttttttttttttttttttttttttttttttttttttttttttttttttttttttttttttttttttttttttttttttttttttttttttttttttttttttttttttttttttttttttttttttttttttttttttttttttttttttttttttttttttttttttttttttttttttttttttttttttttttttttttttttttttttttttttttttttttttttttttttttttttttttttttttttttttttttttttttttttttttttttttttttttttttttttttttttttttttttttttttttttttttttttttttttttttttttttttttttttttttttttttttttttttttttttttttttttttttttttttttttttttttttttttttttttttttttttttttttttttttttttttttttttttttttttttttttttttttttttttttttttttttttttttttttttttttttttttttttttttttttttttttttttttttttttttttttttttttttttttttttttttttttttttttttttttttttttttttttttttttttttttttttttttttttttttttttttttttttttttttttttttttttttttttttttttttttttttttttttttttttttttttttttttttttttttttttttttttttttttttttttttttttttttttttttttttttttttttttttttttttttttttttttttttttttttttttttttttttttttttttttttttttttttttttttttttttttttttttttttttttttttttttttttttttttttttttttttttttttttttttttttttttttttttttttttttttttttttttttttttttttttttttttttttttttttttttttttttttttttttttttttttttttttttttttttttttttttttttttttttttttttttttttttttttttttttttttttttttttttttttttttttttttttttttttttttttttttttttttttttttttttttttttttttttttttttttttttttttttttttttttttttttttttttttttttttttttttttttttttttttttttttttttttttttttttttttttttttttttttttttttttttttttttttttttttttttttt

SEQ ID NO: 2589 - DNA, 5000 bp, Artificial Sequence; identical to SEQ ID NO: 34
  source: /note="Description of Artificial Sequence: Synthetic polynucleotide"
  misc_feature (1)..(5000): /note="This sequence may encompass 50-5000 nucleotides"

What is claimed is:

1. A CAR therapy comprising a cell, e.g., a population of immune effector cells, comprising, e.g., expressing, a chimeric antigen receptor (CAR) for use in combination with an inhibitor of a pro-M2 macrophage molecule in treating a subject having a disease associated with expression of a tumor antigen, wherein the CAR comprises a tumor antigen binding domain, a transmembrane domain, and an intracellular signaling domain.

2. A method of treating a subject having a disease associated with expression of a tumor antigen, comprising administering to the subject:
(i) a CAR therapy comprising a cell, e.g., a population of immune effector cells, comprising, e.g., expressing, a chimeric antigen receptor (CAR), wherein the CAR comprises a tumor antigen binding domain, a transmembrane domain, and an intracellular signaling domain; and
(ii) an inhibitor of a pro-M2 macrophage molecule.

3. The CAR therapy for use or the method of claim 1 or 2, wherein the CAR therapy and the inhibitor of a pro-M2 macrophage molecule are administered sequentially.

4. The CAR therapy for use or the method of any of claims 1-3, wherein the inhibitor of a pro-M2 macrophage molecule is administered prior to the CAR therapy.

5. The CAR therapy for use or the method of any of claims 1-4, wherein the inhibitor of a pro-M2 macrophage molecule and the CAR therapy are administered simultaneously or concurrently.

6. The CAR therapy for use or the method of any of claims 1-5, wherein the CAR therapy is administered as (a) single infusion or (b) multiple infusions (e.g., a single dose split into multiple infusions), and wherein the inhibitor of a pro-M2 macrophage molecule is administered as (a) a single dose, or (b) multiple doses (e.g., a first and second, and optionally one or more subsequent doses).

7. The CAR therapy for use or the method of any of claims 1-6, wherein a dose of the CAR therapy is administered after (e.g., at least 1 day, 2 days, 3 days, 4 days, 5 days, 6 days, 7 days, 1 week, 2 weeks, 3 weeks, 4 weeks, 5 weeks, or more, after) administration of a first dose of the inhibitor of a pro-M2 macrophage molecule, e.g., but before administration of the second dose of the inhibitor.

8. The CAR therapy for use or the method of claim 1 or 5, wherein a dose of the CAR therapy is administered concurrently with (e.g., within 2 days (e.g., within 2 days, 1 day, 24 hours, 12 hours, 6 hours, 4 hours, 2 hours, or less) of), the administration of a first dose of the inhibitor of a pro-M2 macrophage molecule.

9. The CAR therapy for use or the method of any of claims 6-8, wherein one or more subsequent doses of the inhibitor of a pro-M2 macrophage molecule are administered after a second dose of the inhibitor of a pro-M2 macrophage molecule.

10. The CAR therapy for use or the method of any of claims 1-9, wherein the inhibitor of a pro-M2 macrophage molecule is administered in more than one dose, and the doses are administered twice a day (BID), once a day, once a week, once every 14 days, or once every month.

11. The CAR therapy for use or the method of any of claims 1-10, wherein the administering of the inhibitor of a pro-M2 macrophage molecule comprises multiple doses comprising a duration of at least 7 days, e.g., at least 7 days, 8 days, 9 days, 10 days, 1 week, 2 weeks, 3 weeks, 4 weeks, 5 weeks, 6 weeks, 1 month, 2 months, 3 months, 4 months, 5 months, 6 months, 7 months, 8 months, or more.

12. The CAR therapy for use or the method of any of claims 1-11, wherein the CAR therapy is administered at a dose comprising at least about 5×10⁶, 1×10⁷, 1.5×10⁷, 2×10⁷, 2.5×10⁷, 3×10⁷, 3.5×10⁷, 4×10⁷, 5×10⁷, 1×10⁸, 1.5×10⁸, 2×10⁸, 2.5×10⁸, 3×10⁸, 3.5×10⁸, 4×10⁸, 5×10⁸, 1×10⁹, 2×10⁹, or 5×10⁹ cells, e.g., CAR positive cells.

13. The CAR therapy for use or the method of any of claims 1-12, wherein the inhibitor of a pro-M2 macrophage molecule is an IL-13 inhibitor, an IL-4 inhibitor, an IL-13Rα1 inhibitor, an IL-4Rα inhibitor, an IL-10 inhibitor, a CSF-1 inhibitor, a TGF beta inhibitor, a JAK2 inhibitor, a cell surface molecule, an iron oxide, a small molecule inhibitor, a PI3K inhibitor, an HDAC inhibitor, an inhibitor of the glycolytic pathway, a mitochondria-targeted antioxidant, or combinations thereof.

14. The CAR therapy for use or the method of claim 13, wherein the inhibitor of a pro-M2 macrophage molecule is a small molecule, an antibody or antigen-binding fragment thereof, a protein (e.g., a fusion protein), a nucleic acid (e.g., an shRNA or siRNA), or a gene editing system.

15. The CAR therapy for use or the method of claim 13, wherein the inhibitor of a pro-M2 macrophage molecule is an antibody or antigen-binding fragment thereof.

16. The CAR therapy for use or the method of any of claims 1-15, wherein the tumor antigen binding domain of the CAR binds CD123.

17. A CAR therapy comprising a cell, e.g., a population of immune effector cells, comprising, e.g., expressing, a chimeric antigen receptor (CAR) for use in combination with a tumor targeting therapy in treating a subject having a disease associated with expression of a tumor antigen, wherein:
(i) the CAR comprises a tumor antigen binding domain that binds CD123 (CD123 CAR), a transmembrane domain, and an intracellular signaling domain; and
(ii) the tumor targeting therapy comprises a second CAR therapy that comprises a cell, e.g., a population of immune effector cells, compring, e.g., expressing, a CAR comprising a tumor antigen binding domain that binds to a tumor antigen other than CD123 (e.g., a CAR that binds to a solid tumor antigen or a hematologic tumor antigen other than CD123),
wherein the CD123 CAR is administered in an amount and/or time sufficient to result in inhibition of an M2 macrophage activity.

18. A method of treating a subject having a disease associated with expression of a tumor antigen, comprising administering to the subject:
(i) a CAR therapy comprising a cell, e.g., a population of immune effector cells, comprising, e.g., expressing, a chimeric antigen receptor (CAR), wherein the CAR comprises a tumor antigen binding domain that binds CD123 (CD123 CAR), a transmembrane domain, and an intracellular signaling domain; and
(ii) a tumor targeting therapy, wherein the tumor targeting therapy comprises a second CAR therapy that comprises a cell, e.g., a population of immune effector cells, compring, e.g., expressing, a CAR comprising a tumor antigen binding domain that binds to a tumor antigen other than CD123 (e.g., a CAR that binds to a solid tumor antigen or a hematologic tumor antigen other than CD123),
wherein the CD123 CAR is administered in an amount and/or time sufficient to result in inhibition of an M2 macrophage activity.

19. The CAR therapy for use or the method of claim 17 or 18, wherein the inhibition of the M2 macrophage activity comprises inhibition of polarization of a macrophage to an M2 phenotype, and/or reversal of a phenotype of an M2 macrophage.

20. The CAR therapy for use of any of claims 17-19, wherein the tumor antigen binding domain of the second CAR therapy binds to CD19, mesothelin, or EGFRviii.

21. The CAR therapy for use or the method of any of claims 16-20, wherein the tumor antigen binding domain of the CAR that binds to CD123 comprises a heavy chain complementary determining region 1 (HC CDR1), a heavy chain complementary determining region 2 (HC CDR2), and a heavy chain complementary determining region 3 (HC CDR3) of any CD123 heavy chain binding domain amino acid sequence listed in Table 16, Table 18, Table 20, Table 22, Table 24, Table 25, Table 26, Table 27 or Table 28; and
a light chain complementary determining region 1 (LC CDR1), a light chain complementary determining region 2 (LC CDR2), and a light chain complementary determining region 3 (LC CDR3) of any CD123 light chain binding domain amino acid sequence listed in Table 17, Table 19, Table 21, Table 23, Table 24, Table 25, Table 26, Table 27 or Table 28.

22. The CAR therapy for use or the method of any of claims 16-21, wherein the CD123 binding domain comprises a CD123 binding domain (e.g., scFv) amino acid sequence listed in Table 26, Table 27 or Table 28.

23. The CAR therapy for use or the method of any of claims 16-22, wherein the CAR comprises (e.g., consists of) a CAR amino acid sequence listed in Table 26 or Table 27.

24. The CAR therapy for use or the method of any of claim 1-15, 17, or 18, wherein the tumor antigen binding domain of the CAR binds mesothelin.

25. The CAR therapy for use or the method of claim 24, wherein the tumor antigen binding domain of the CAR comprises a heavy chain complementary determining region 1 (HC CDR1), a heavy chain complementary determining region 2 (HC CDR2), and a heavy chain complementary determining region 3 (HC CDR3) of any mesothelin heavy chain binding domain amino acid sequence listed in Table 2, Table 3 or Table 11; and
a light chain complementary determining region 1 (LC CDR1), a light chain complementary determining region 2 (LC CDR2), and a light chain complementary determining region 3 (LC CDR3) of any mesothelin light chain binding domain amino acid sequence listed in Table 2, Table 4 or Table 11.

26. The CAR therapy for use or the method of claim 24 or 25, wherein the mesothelin binding domain comprises a mesothelin binding domain (e.g., scFv) amino acid sequence listed in Table 2 or Table 11.

27. The CAR therapy for use or the method of any of claims 24-26, wherein the CAR comprises (e.g., consists of) a CAR amino acid sequence listed in Table 11.

28. The CAR therapy for use or the method of any of claim 1-15, 17, or 18, wherein the tumor antigen binding domain of the CAR binds EGFRvIII.

29. The CAR therapy for use or the method of claim 28, wherein the tumor antigen binding domain of the CAR comprises a heavy chain complementary determining region 1 (HC CDR1), a heavy chain complementary determining region 2 (HC CDR2), and a heavy chain complementary determining region 3 (HC CDR3) of any EGFRvIII heavy chain binding domain amino acid sequence listed in Table 5; and
a light chain complementary determining region 1 (LC CDR1), a light chain complementary determining region 2 (LC CDR2), and a light chain complementary determining region 3 (LC CDR3) of any EGFRvIII light chain binding domain amino acid sequence listed in Table 5.

30. The CAR therapy for use or the method of claim 28 or 29, wherein the EGFRvIII binding domain comprises a EGFRvIII binding domain (e.g., scFv) amino acid sequence listed in Table 5.

31. The CAR therapy for use or the method of any of claims 28-30, wherein the CAR comprises (e.g., consists of) a CAR amino acid sequence listed in Table 30.

32. The CAR therapy for use or the method of claim 1-15, 17, or 18, wherein the tumor antigen binding domain of the CAR binds CD19.

33. The CAR therapy for use or the method of claim 32, wherein the tumor antigen binding domain of the CAR comprises a heavy chain complementary determining region 1 (HC CDR1), a heavy chain complementary determining region 2 (HC CDR2), and a heavy chain complementary determining region 3 (HC CDR3) of any CD19 heavy chain binding domain amino acid sequence listed in Table 6, Table 7, or Table 9; and
a light chain complementary determining region 1 (LC CDR1), a light chain complementary determining region 2 (LC CDR2), and a light chain complementary determining region 3 (LC CDR3) of any CD19 light chain binding domain amino acid sequence listed in Table 6, Table 8, or Table 9.

34. The CAR therapy for use or the method of claim 32 or 33, wherein the CD19 binding domain comprises a CD19 binding domain (e.g., scFv) amino acid sequence listed in Table 6 or Table 9.

35. The CAR therapy for use or the method of any of claims 32-34, wherein the CD19 binding domain comprises an amino acid sequence selected from the group consisting of SEQ ID NO: 83; SEQ ID NO: 84, SEQ ID NO: 85; SEQ ID NO: 86; SEQ ID NO: 87; SEQ ID NO: 88; SEQ ID NO: 89, SEQ ID NO: 90, SEQ ID NO: 91, SEQ ID NO: 92, SEQ ID NO: 93, SEQ ID NO: 94, SEQ ID NO: 95, and SEQ ID NO: 112.

36. The CAR therapy for use or the method of any of the preceding claims, wherein the tumor antigen binding domain of the CAR binds a solid tumor antigen.

37. The CAR therapy for use or the method of any of the preceding claims, wherein the tumor antigen binding domain of the CAR binds an antigen expressed on a tumor associated with tumor-associated macrophages (TAMs) and/or myeloid derived suppressor cells (MDSCs).

38. The CAR therapy for use or the method of claim 36 or 37, wherein the solid tumor antigen or the antigen expressed on a tumor associated with tumor-associated macrophages (TAMs) and/or myeloid derived suppressor cells (MDSCs) is CD123, EGFRvIII, mesothelin, GD2, Tn antigen, sTn antigen, Tn-O-Glycopeptides, sTn-O-Glycopeptides, PSMA, CD97, TAG72, CD44v6, CEA, EPCAM, KIT, IL-13Ra2, leguman, GD3, CD171, IL-11Ra, PSCA, MAD-CT-1, MAD-CT-2, VEGFR2, LewisY, CD24, PDGFR-beta, SSEA-4, folate receptor alpha, ERBBs (e.g., ERBB2), Her2/neu, MUC1, EGFR, NCAM, Ephrin B2, CAIX, LMP2, sLe, HMWMAA, o-acetyl-GD2, folate receptor beta, TEM1/CD248, TEM7R, FAP, Legumain, HPV E6 or E7, ML-IAP, CLDN6, TSHR, GPRCSD, ALK, Polysialic acid, Fos-related antigen, neutrophil elastase, TRP-2, CYP1B1, sperm protein 17, beta human chorionic gonadotropin, AFP, thyroglobulin, PLAC1, globoH, RAGE1, MN-CA IX, human telomerase reverse transcriptase, intestinal carboxyl esterase, mut hsp 70-2, NA-17, NY-BR-1, UPK2, HAVCR1, ADRB3, PANX3, NY-ESO-1, GPR20, Ly6k, OR51E2, TARP, GFRα4, or a peptide of any of these antigens presented on MHC.

39. The CAR therapy for use or the method of any of the preceding claims, wherein the intracellular signaling domain comprises a primary signaling domain comprising a CD3-zeta stimulatory domain.

40. The CAR therapy for use or the method of any of the preceding claims, wherein the intracellular signaling domain comprises a costimulatory domain which is an intracellular domain of a costimulatory protein selected from the group consisting of CD27, CD28, 4-1BB (CD137), OX40, GITR, CD30, CD40, ICOS, BAFFR, HVEM, ICAM-1, lymphocyte function-associated antigen-1 (LFA-1), CD2, CDS, CD7, CD287, LIGHT, NKG2C, NKG2D, SLAMF7, NKp80, NKp30, NKp44, NKp46, CD160, B7-H3, and a ligand that specifically binds with CD83.

41. The CAR therapy for use or the method of claim 40, wherein the costimulatory domain comprises an intracellular domain of 4-1BB.

42. The CAR therapy for use or the method of claim 40, wherein the costimulatory domain comprises an intracellular domain of CD28.

43. The CAR therapy for use or the method of any of claims 40-42, wherein the intracellular signaling domain comprises two costimulatory domains, e.g., a 4-1BB costimulatory domain and a CD28 costimulatory domain.

44. The CAR therapy for use or the method of any of the preceding claims, wherein the disease associated with expression of a tumor antigen is cancer.

45. The method of claim 44, wherein the cancer is Hodgkin lymphoma.

46. The method of claim 44, wherein the cancer is a solid cancer.

47. The CAR therapy for use or the method of any of the preceding claims, wherein the cell comprising a CAR comprises a nucleic acid encoding the CAR.

48. The CAR therapy for use or the method of claim 47, wherein the nucleic acid encoding the CAR is a lentiviral vector.

49. The CAR therapy for use or the method of claim 47 or 48, wherein the nucleic acid encoding the CAR is introduced into the cells by lentiviral transduction.

50. The CAR therapy for use or the method of any of claims 47-49, wherein the nucleic acid encoding the CAR is an RNA, e.g., an in vitro transcribed RNA.

51. The CAR therapy for use or the method of any of claims 47-50, wherein the nucleic acid encoding the CAR is introduced into the cells by electroporation.

52. The CAR therapy for use or the method of any of claims 1-51, wherein the cell is a T cell or an NK cell.

53. The CAR therapy for use or the method of claim 52, wherein the T cell is an autologous or allogeneic T cell.

54. The CAR therapy for use or the method of any of claims 1-53, wherein the subject is a mammal, e.g., a human.

55. The CAR therapy for use or the method of claims 17-54, wherein the CD123 CAR therapy and the tumor targeting therapy are administered sequentially, simultaneously, or concurrently.

56. The CAR therapy for use or the method of claims 17-55, wherein the CD123 CAR therapy is administered prior to the tumor targeting therapy.

57. The CAR therapy for use or the method of claim 56, wherein the CD123 CAR therapy is administered at least 5 days, at least 7 days, at least 10 days, at least 15 days, at least 20 days, at least 1 month, at least 2 months, at least 3 months, at least 4 months, at least 5 months, at least 6 months, at least 7 months, at least 8 months, at least 9 months or at least 10 months, prior to administration of the tumor targeting therapy.

58. The CAR therapy for use or the method of claims 17-57, wherein the CD123 CAR therapy is administered as (a) a single infusion or (b) multiple infusions (e.g., a single dose split into multiple infusions), and wherein the tumor targeting therapy is administered as (a) a single dose, or (b) multiple doses (e.g., a first and second, and optionally one or more subsequent doses).

59. The CAR therapy for use or the method of claims 17-58, wherein the CAR therapy or the tumor targeting therapy is administered at a dose comprising at least about 5×10⁶, 1×10⁷, 1.5×10⁷, 2×10⁷, 2.5×10⁷, 3×10⁷, 3.5×10⁷, 4×10⁷, 5×10⁷, 1×10⁸, 1.5×10⁸, 2×10⁸, 2.5×10⁸, 3×10⁸, 3.5×10⁸, 4×10⁸, 5×10⁸, 1×10⁹, 2×10⁹, or 5×10⁹ cells, e.g., CAR positive cells.

60. The CAR therapy for use or the method of claims 17-60, wherein the CAR therapy and the tumor targeting therapy are formulated in a pharmaceutical composition.

61. A pharmaceutical composition comprising (i) a cell, e.g., a population of immune effector cells, comprising, e.g., expressing, a chimeric antigen receptor (CAR), wherein the CAR comprises a tumor antigen binding domain, a transmembrane domain, and an intracellular signaling domain; and (ii) an inhibitor of a pro-M2 macrophage molecule.

62. A pharmaceutical composition comprising (i) a cell, e.g., a population of immune effector cells, comprising, e.g., expressing, a chimeric antigen receptor (CAR), wherein the CAR comprises a tumor antigen binding domain, a transmembrane domain, and an intracellular signaling domain; and (ii) an inhibitor of a pro-M2 macrophage molecule for use in treating a disease or disorder.

63. A method for stimulating a T cell-mediated immune response to a solid tumor cell in a mammal, the method comprising administering to a mammal an effective amount of the composition of claim 61.

64. A method of providing an anti-solid tumor immunity in a mammal, comprising administering to the mammal an effective amount of the composition of claim 61.

65. A method of treating a mammal having a disease associated with expression of a solid tumor antigen, said method comprising administering an effective amount of the composition of claim 61.

66. The method of any of claims 63-65, wherein the cell, e.g., the population of immune effector cells, and the inhibitor of a pro-M2 macrophage molecule are provided for separate administration (e.g., in two separate compositions).

67. The method of any of claims 63-65, wherein the cell, e.g., the population of immune effector cells, and the inhibitor of a pro-M2 macrophage molecule are provided for simultaneous administration (e.g., in one composition).
